(19) United States
(12) Patent Application Publication
(10) Pub. No.: US 2024/0209343 A1
(43) Pub. Date: Jun. 27, 2024

(54) ENGINEERED RNA LIGASE VARIANTS

(71) Applicant: Codexis, Inc., Redwood City, CA (US)

(72) Inventors: Rachelle Copeland, Redwood City, CA (US); David Elgart, San Mateo, CA (US); Jason Fell, Martinez, CA (US); Jovana Nazor, Milpitas, CA (US); Leland Ken Wong, San Bruno, CA (US); Zhe Rui, Newark, CA (US)

(21) Appl. No.: 18/395,294

(22) Filed: Dec. 22, 2023

Related U.S. Application Data
(60) Provisional application No. 63/476,912, filed on Dec. 22, 2022.

(51) Int. Cl. C12N 9/00; C12Q 1/6813

(52) U.S. Cl. CPC C12N 9/93; C12Q 1/6813; C12Y 605/01003

(57) ABSTRACT

The present disclosure relates to engineered RNA ligase polypeptides and compositions thereof, as well as polynucleotides encoding the engineered RNA ligase polypeptides. The present disclosure also provides methods of using the engineered RNA ligase polypeptides or compositions thereof for molecular biological, diagnostic, and other purposes.

### CROSS-REFERENCE TO RELATED APPLICATIONS

[0001] This application claims the benefit of U.S. Provisional Application No. 63/476,912, filed Dec. 22, 2022, which is incorporated by reference herein.

### REFERENCE TO SEQUENCE LISTING, TABLE OR COMPUTER PROGRAM

[0002] The Sequence Listing concurrently submitted herewith as file name CX9-231US1_ST26.xml, created on Dec. 22, 2023, with a file size of 1,145,043 bytes, is part of the specification and is incorporated by reference herein.

### TECHNICAL FIELD

[0003] The present disclosure provides engineered RNA ligase polypeptides and compositions thereof, as well as polynucleotides encoding the engineered RNA ligase polypeptides. The disclosure also provides methods of using the recombinant RNA ligase or compositions thereof, including for the synthesis of polynucleotides, as molecular biological tools, and other purposes.

### BACKGROUND

[0004] RNA ligases are a family of enzymes that catalyze the joining of pieces of RNA or DNA that are adjacent to each other. They are involved in the editing and repair of RNA, and therefore are essential proteins for biological processes. RNA ligases find uses in the profiling of target sequences, the quantification of different RNA species, the detection of particular RNA mutations, and the synthesis of polynucleotides. Based on their substrate preference, the known RNA ligases are categorized into two groups. Single stranded RNA ligases, also referred to as RNA ligase 1 or RNA ligase I, are capable of joining two RNA or DNA without a hybridizing template. Double stranded RNA ligases, also referred to as RNA ligase 2 or RNA ligase II, preferentially join a nick in an RNA duplex. RNA ligase 1 type proteins have been identified in fungi, baculoviruses, archea, and archeal viruses (thermostable properties). RNA ligase 2 type enzymes have been identified in Vibrio phage KVP40, baculoviruses and entomopoxviruses, some parasites, and archaea species.

[0005] Prototypical RNA ligases are those from bacteriophage T4. The T4 RNA Ligase 1 ligates a 5′-phosphoryl nucleic acid donor to a 3′-hydroxyl nucleic acid acceptor by connecting them with a phosphodiester bond in an ATP dependent reaction. Substrates for T4 RNA Ligase 1 include ssRNA, ssDNA, and dinucleoside pyrophosphates. T4 RNA ligase 1 is used for ligation of ssRNA and DNA, RNA ligase-mediated rapid amplification of cDNA ends (RLM-RACE), ligation of oligonucleotide adapters to cDNA or single-stranded primer extension products for PCR, oligonucleotide synthesis, and various 5′ nucleotide modifications of nucleic acids. T4 RNA ligase 2 ligates adjacent 5′ phosphate at the end of RNA and DNA strands to 3′ OH of RNA strands in the context of nicked dsRNA or RNA/DNA hybrids. T4 RNA ligase 2 exhibits significant homology to DNA ligases and mRNA capping enzymes, and is used to seal nicks in dsRNA and dsRNA/DNA hybrids. While T4 RNA ligases can act on RNA and DNA, RNA is the preferred substrate, with DNA being a less effective acceptor in the ligation reaction.

[0006] While T4 RNA ligases have become useful tools for labeling, circularizing, and ligating RNA and RNA/DNA, desirable are ligases that provide more facile and efficient ligation of polynucleotide substrates, including improved ligation of polynucleotides that contain nucleotide analogs, such as modified sugar residues and non-standard internucleotide linkages.

### SUMMARY

[0007] The present disclosure provides engineered RNA ligase polypeptides and compositions thereof, as well as polynucleotides encoding the engineered RNA ligase polypeptides. The present disclosure also provides methods of using the engineered RNA ligase polypeptides and compositions thereof for nucleic acid synthesis, diagnostic assays, and other purposes.

[0008] In one aspect, the present disclosure provides an engineered RNA ligase, or a functional fragment thereof, comprising an amino acid sequence having at least 80%, 81%, 82%, 83%, 84%, 85%, 86%, 87%, 88%, 89%, 90%, 91%, 92%, 93%, 94%, 95%, 96%, 97%, 98%, 99%, or more sequence identity to a reference sequence corresponding to residues 12 to 346 of an even-numbered SEQ ID NO. of SEQ ID NOs: 14 and 24-582, or to a reference sequence corresponding to an even-numbered SEQ ID NO. of SEQ ID NOs: 14 and 24-582, wherein the amino acid sequence comprises one or more substitutions relative to the reference sequence corresponding to residues 12 to 346 of SEQ ID NO: 14, 42, or 204, or relative to the reference sequence corresponding to SEQ ID NO: 14, 42, or 204.

[0009] In some embodiments, the engineered RNA ligase comprises an amino acid sequence having at least 80%, 81%, 82%, 83%, 84%, 85%, 86%, 87%, 88%, 89%, 90%, 91%, 92%, 93%, 94%, 95%, 96%, 97%, 98%, 99%, or more sequence identity to the reference sequence corresponding to residues 12 to 346 of SEQ ID NO: 14, 42, or 204, or to the reference sequence corresponding to SEQ ID NO: 14, 42, or 204, wherein the amino acid sequence comprises one or more substitutions relative to the reference sequence corresponding to residues 12 to 346 of SEQ ID NO: 14, 42, or 204, or relative to the reference sequence corresponding to SEQ ID NO: 14, 42, or 204.

[0010] In some embodiments, the engineered RNA ligase comprises an amino acid sequence having at least 80%, 81%, 82%, 83%, 84%, 85%, 86%, 87%, 88%, 89%, 90%, 91%, 92%, 93%, 94%, 95%, 96%, 97%, 98%, 99%, or more sequence identity to the reference sequence corresponding to residues 12 to 346 of SEQ ID NO: 14, or to the reference sequence corresponding to SEQ ID NO: 14, wherein the amino acid sequence comprises one or more substitutions relative to the reference sequence corresponding to residues 12 to 346 of SEQ ID NO: 14, or relative to the reference sequence corresponding to SEQ ID NO: 14.

[0011] In some embodiments, the engineered RNA ligase comprises an amino acid sequence having at least 80%, 81%, 82%, 83%, 84%, 85%, 86%, 87%, 88%, 89%, 90%, 91%, 92%, 93%, 94%, 95%, 96%, 97%, 98%, 99%, or more sequence identity to the reference sequence corresponding to residues 12 to 346 of SEQ ID NO: 42 or 204, or to the reference sequence corresponding to SEQ ID NO: 42 or 204, wherein the amino acid sequence comprises one or more substitutions relative to the reference sequence corresponding to residues 12 to 346 of SEQ ID NO: 14, or relative to the reference sequence corresponding to SEQ ID NO: 14.

[0012] In some embodiments, the engineered RNA ligase comprises an amino acid sequence having at least 80%, 81%, 82%, 83%, 84%, 85%, 86%, 87%, 88%, 89%, 90%, 91%, 92%, 93%, 94%, 95%, 96%, 97%, 98%, 99%, or more sequence identity to the reference sequence corresponding to residues 12 to 346 of an even-numbered SEQ ID NO. of SEQ ID NOs: 24-582, or to the reference sequence corresponding to an even-numbered SEQ ID NO. of SEQ ID NOs: 24-582, wherein the amino acid sequence comprises one or more substitutions relative to the reference sequence corresponding to residues 12 to 346 of SEQ ID NO: 14, or relative to the reference sequence corresponding to SEQ ID NO: 14.

[0013] In some embodiments, the engineered RNA ligase comprises an amino acid sequence having at least 80%, 81%, 82%, 83%, 84%, 85%, 86%, 87%, 88%, 89%, 90%, 91%, 92%, 93%, 94%, 95%, 96%, 97%, 98%, 99%, or more sequence identity to the reference sequence corresponding to residues 12 to 346 of an even-numbered SEQ ID NO. of SEQ ID NOs: 24-128, or to the reference sequence corresponding to an even-numbered SEQ ID NO. of SEQ ID NOs: 24-128, wherein the amino acid sequence comprises one or more substitutions relative to the reference sequence corresponding to residues 12 to 346 of SEQ ID NO: 14, or relative to the reference sequence corresponding to SEQ ID NO: 14.

[0014] In some embodiments, the amino acid sequence of the engineered RNA ligase comprises at least a substitution at amino acid position 2, 14, 15, 18, 33, 39, 63, 69, 81, 83, 85, 86, 89, 95, 116, 117, 119, 138, 142, 144, 149, 154, 156, 159, 171, 175, 177, 181, 185, 186, 195, 202, 212, 214, 224, 226, 230, 247, 256, 257, 260, 266, 275, 280, 283, 285, 288, 291, 296, 303, 306, 307, 310, 314, 315, 316, 317, 326, 330, 331, 333, 334, 335, 337, 339, 342, or 345, or combinations thereof, wherein the amino acid positions are relative to the reference sequence corresponding to residues 12 to 346 of SEQ ID NO: 14, or relative to the reference sequence corresponding to SEQ ID NO: 14.

[0015] In some embodiments, the amino acid sequence of the engineered RNA ligase comprises at least a substitution at amino acid position 95 or 177, or combination thereof, wherein the amino acid positions are relative to the reference sequence corresponding to residues 12 to 346 of SEQ ID NO: 14, or relative to the reference sequence corresponding to SEQ ID NO: 14.

[0016] In some embodiments, the amino acid sequence of the engineered RNA ligase comprises at least a substitution at amino acid position 15, 95, 149, 154, 156, 177, 186, 195, 224, or 226, or combinations thereof, wherein the amino acid positions are relative to the reference sequence corresponding to residues 12 to 346 of SEQ ID NO: 14, or relative to the reference sequence corresponding to SEQ ID NO: 14.

[0017] In some embodiments, the amino acid sequence of the engineered RNA ligase comprises at least a substitution or substitution set at amino acid position(s) 177/260/307/345, 171/175/183/280/283/303, 95/159/177/260/288, 175/183/247/280/283/296, 177/307, 81/171/183/335, 175/183, 81/175/183/280/296/335/339, 81/183/247/266, 95/177, 171/280/283/296/303, 85/177/260/288/333/345, 177/291/307/333, 81/171/175/183/316/337, 81/171/266/280/283/335/339, 177, 95/159/177/260/280/288/306/345, 171/175/335, 177/260/30/333, 14/95/177/288/307, 95/177/345, 95/159/177/260/285/288, 266/296, 81/283/335/337, 95/159/177/260/342/345, 63/171/175/183/266/280/296/316, 280/335/337, 81/171/280, 81/171/175/296/316, 171/175/316/335, 171/280/283/296/316, 171/283/335, 63/171/175/183/266/283/303/316, 171/247/266/283/296/303/316/335, 63/81/171/175/183/266/280/283/337, 81/171/303/316/335, 288/307, 14/95/159/177/345, 81/171/175/183/247/266/280/283, 81/247/266, 280, 85/177/260, 63/183, 175/183/247/280/283/316, 291, 247, 171/280/283, 81/171/175/280/316, 333, 171/296/316, 81/171, or 280/316/335, wherein the amino acid positions are relative to the reference sequence corresponding to residues 12 to 346 of SEQ ID NO: 14, or relative to the reference sequence corresponding to SEQ ID NO: 14.

[0018] In some embodiments, the amino acid sequence of the engineered RNA ligase comprises at least one substitution provided in Tables 5.1, 6.1, 7.1, 8.1, 9.1, 10.1, 11.1, and 12.1, wherein the amino acid positions are relative to the reference sequence corresponding to residues 12 to 346 of SEQ ID NO: 14, or relative to the reference sequence corresponding to SEQ ID NO: 14.

[0019] In some embodiments, the amino acid sequence of the engineered RNA ligase comprises at least a substitution or substitution set of an RNA ligase variant provided in Tables 5.1, 6.1, 7.1, 8.1, 9.1, 10.1, 11.1, and 12.1, wherein the amino acid positions are relative to the reference sequence corresponding to residues 12 to 346 of SEQ ID NO: 14, or relative to the reference sequence corresponding to SEQ ID NO: 14.

[0020] In some embodiments, the engineered RNA ligase comprises an amino acid sequence having at least 80%, 81%, 82%, 83%, 84%, 85%, 86%, 87%, 88%, 89%, 90%, 91%, 92%, 93%, 94%, 95%, 96%, 97%, 98%, 99%, or more sequence identity to the reference sequence corresponding to residues 12 to 346 of SEQ ID NO: 42 or 204, or to the reference sequence corresponding to SEQ ID NO: 42 or 204.

[0021] In some embodiments, the engineered RNA ligase comprises an amino acid sequence having at least 80%, 81%, 82%, 83%, 84%, 85%, 86%, 87%, 88%, 89%, 90%, 91%, 92%, 93%, 94%, 95%, 96%, 97%, 98%, 99%, or more sequence identity to the reference sequence corresponding to residues 12 to 346 of an even-numbered SEQ ID NO. of SEQ ID NOs: 24-582, or to the reference sequence corresponding to an even-numbered SEQ ID NO. of SEQ ID NOs: 24-582.

[0022] In some embodiments, the engineered RNA ligase comprises an amino acid sequence having at least 80%, 81%, 82%, 83%, 84%, 85%, 86%, 87%, 88%, 89%, 90%, 91%, 92%, 93%, 94%, 95%, 96%, 97%, 98%, 99%, or more sequence identity to the reference sequence corresponding to residues 12 to 346 of SEQ ID NO: 42 or 204, or to the reference sequence corresponding to SEQ ID NO: 42 or 204, wherein the amino acid sequence comprises one or more substitutions relative to the reference sequence corresponding to residues 12 to 346 of SEQ ID NO: 42 or 204, or relative to the reference sequence corresponding to SEQ ID NO: 42 or 204.

[0023] In some embodiments, the engineered RNA ligase comprises an amino acid sequence having at least 80%, 81%, 82%, 83%, 84%, 85%, 86%, 87%, 88%, 89%, 90%, 91%, 92%, 93%, 94%, 95%, 96%, 97%, 98%, 99%, or more sequence identity to the reference sequence corresponding to residues 12 to 346 of an even-numbered SEQ ID NO. of SEQ ID NOs: 24-582, or to the reference sequence corresponding to an even-numbered SEQ ID NO. of SEQ ID NOs: 24-582, wherein the amino acid sequence comprises one or more substitutions relative to the reference sequence corresponding to residues 12 to 346 of SEQ ID NO: 42 or 204, or relative to the reference sequence corresponding to SEQ ID NO: 42 or 204.

[0024] In some embodiments, the amino acid sequence of the engineered RNA ligase comprises at least a substitution at amino acid position 2, 14, 15, 18, 33, 39, 63, 69, 81, 83, 85, 86, 89, 95, 116, 117, 119, 138, 142, 144, 149, 154, 156, 159, 171, 175, 177, 181, 185, 186, 195, 202, 212, 214, 224, 226, 230, 247, 256, 257, 260, 266, 275, 280, 283, 285, 288, 291, 296, 303, 306, 307, 310, 314, 315, 316, 317, 326, 330, 331, 333, 334, 335, 337, 339, 342, or 345, or combinations thereof, wherein the amino acid positions are relative to the reference sequence corresponding to residues 12 to 346 of SEQ ID NO: 42 or 204, or relative to the reference sequence corresponding to SEQ ID NO: 42 or 204.

[0025] In some embodiments, the amino acid sequence of the engineered RNA ligase comprises at least a substitution at amino acid position 95 or 177, or combination thereof, wherein the amino acid positions are relative to the reference sequence corresponding to residues 12 to 346 of SEQ ID NO: 42 or 204, or relative to the reference sequence corresponding to SEQ ID NO: 42 or 204.

[0026] In some embodiments, the amino acid sequence of the engineered RNA ligase comprises at least a substitution at amino acid position 15, 95, 149, 154, 156, 177, 186, 195, 224, or 226, or combinations thereof, wherein the amino acid positions are relative to the reference sequence corresponding to residues 12 to 346 of SEQ ID NO: 42 or 204, or relative to the reference sequence corresponding to SEQ ID NO: 42 or 204.

[0027] In some embodiments, the engineered RNA ligase comprises an amino acid sequence having at least 80%, 81%, 82%, 83%, 84%, 85%, 86%, 87%, 88%, 89%, 90%, 91%, 92%, 93%, 94%, 95%, 96%, 97%, 98%, 99%, or more sequence identity to the reference sequence corresponding to residues 12 to 346 of SEQ ID NO: 42, or to the reference sequence corresponding to SEQ ID NO: 42, wherein the amino acid sequence comprises one or more substitutions relative to the reference sequence corresponding to residues 12 to 346 of SEQ ID NO: 42, or relative to the reference sequence corresponding to SEQ ID NO: 42.

[0028] In some embodiments, the engineered RNA ligase comprises an amino acid sequence having at least 80%, 81%, 82%, 83%, 84%, 85%, 86%, 87%, 88%, 89%, 90%, 91%, 92%, 93%, 94%, 95%, 96%, 97%, 98%, 99%, or more sequence identity to the reference sequence corresponding to residues 12 to 346 of an even-numbered SEQ ID NO. of SEQ ID NOs: 130-478, or to the reference sequence corresponding to an even-numbered SEQ ID NO. of SEQ ID NOs: 130-478, wherein the amino acid sequence comprises one or more substitutions relative to the reference sequence corresponding to residues 12 to 346 of SEQ ID NO: 42, or relative to the reference sequence corresponding to SEQ ID NO: 42.

[0029] In some embodiments, the amino acid sequence of the engineered RNA ligase comprises at least a substitution or substitution set at amino acid position(s) 149/156/195, 15/149/186/224/317, 15/156/195/224/226/317/331, 15/195/317/331, 149/224/331, 15/195/224/226/317/331, 15/33/86/149/154/195/317, 15/86/154/156/186/195/224/226/331, 15/149/224/317/331, 15/154/156/186/317/331, 15/33/149/224/226/331, 15/186/224/226/317/331, 15/33/149/186/224/331, 195/224/331, 15/86/156/186/195/226/317/331, 15/195/22/331, 156/186/224/226/331, 15/149/154/156/224/226, 33/156/186/195/331, 15/86/149/154/156/317/331, 15/186/317/331, 15/86/149/154/195/331, 15/33/149/154/156/226, 15/149/154/186/317/331, 195/331, 15/86/156/186/195/331, 149/156/224/226/331, 15/149/154/156/186/317/331, 15/154/186/195, 15/86/195/224/226, 230, 15/33/156/331, 15/33/156/195/224/226, 33/149/156/317, 15/33/186/195, 334, 15/154/156/224/317, 15/149/186/331, 15/86/149/186/195/317, 15/33/154/195, 15/156/186/331, 15/149/186/317, 15/33/156/186/214/224/331, 15/86/186/224/226/317, 15/154/331, 15/149/154/226, 15/33/195/226, 15/224/317/331, 15/86/186/195/317, 226/317/331, 330, 89, 15/149/186, 156/195/331, 156, 15/86/156/186/331, 275, 15/33/186/224, 15/186/317, 15/33/186/226/317, 15/149/154/156/331, 15/154/226/317, 15/86/156/186/195/317, 257, 15/154/156/186, 33/186/224, 335, 15/86/156/186/195/224/331, 154/156/317, 39, 2, 15/224/226/331, 15/33/149/224, 89/307, 15/154/156/317, 15/186/331, 15/33/154/317, 15/33/195/224/317, 15/156/224/226, 154/186/331, 185, 15/18/149/186/195, 86/149/154/156, 15/33/149/331, 326, 202, 119, 212, 15/33/156/317, 280, 142, 15/149, 15/33/86/156/195, 315, 256, 15/33/156/186, 138, 117, 116, 316, 69, 310, 317, 15/195/331, 15/33/331, 314, or 144, wherein the amino acid positions are relative to the reference sequence corresponding to residues 12 to 346 of SEQ ID NO: 42, or relative to the reference sequence corresponding to SEQ ID NO: 42.

[0030] In some embodiments, the amino acid sequence of the engineered RNA ligase comprises at least a substitution or substitution set at amino acid position(s) 15/149/154/156/186/195/331, 149/154/186/195/224/317/331, 15/33/149/154/186/195, 149/156/186/195/224/226/317, 15/149/156/195/224/226, 15/33/86/149/154/156/186/195/226/331, 15/149/156/186/195/224/317/331, 15/33/149/154/195/317, 15/149/154/195/224/317, 15/149/156/186/224/226/317/331, 15/33/149/154/156/186/195/224/226/317/331, 149/195/224, 86/149/154/156/186/195/331, 15/33/149/156/195/224/317/331, 15/149/154/156/186/195/317/331, 15/33/149/154/156/186/224/331, 15/149/154/156/195/224, 15/149/154/156/195/224/226, 15/149/154/156/186/195/224/317, 33/149/156/186/224/331, 15/33/86/149/195/224/331, 15/86/149/154/156/186/195/331, 149/186/195/331, 15/154/156/186/226/331, 15/149/154/186/195/224/226, 15/149/154/156/195/224/331, 15/33/149/154/156/195/317/331, 15/33/154/156/186/195/224/317/331, 15/149/186/195/224/331, 15/33/149/154/156/195/224/331, 15/149/154/156/224/226/317/331, 15/33/149/156/195/331, 15/149/154/156/186/224/226/331, 154/156/195/224/226, 15/33/86/149/154/156/186/195/224/317/331, 15/149/154/156/186/195/224/226, 15/33/149/195/317/331, 15/149/154/224/331, 149/154/156/195/224/226/331, 15/149/154/195/331, 15/149/154/156/186/195, 15/33/149/154/156/186/195, 15/33/86/149/154/195/224/317/331, or 149/186/195/224/226/331, wherein the amino acid positions are relative to the reference sequence corresponding to residues 12 to 346 of SEQ ID NO: 42, or relative to the reference sequence corresponding to SEQ ID NO: 42.

[0031] In some embodiments, the engineered RNA ligase comprises an amino acid sequence having at least 80%, 81%, 82%, 83%, 84%, 85%, 86%, 87%, 88%, 89%, 90%, 91%, 92%, 93%, 94%, 95%, 96%, 97%, 98%, 99%, or more sequence identity to the reference sequence corresponding to residues 12 to 346 of SEQ ID NO: 204, or to the reference sequence corresponding to SEQ ID NO: 204, wherein the amino acid sequence comprises one or more substitutions relative to the reference sequence corresponding to residues 12 to 346 of SEQ ID NO: 204, or relative to the reference sequence corresponding to SEQ ID NO: 204.

[0032] In some embodiments, the engineered RNA ligase comprises an amino acid sequence having at least 80%, 81%, 82%, 83%, 84%, 85%, 86%, 87%, 88%, 89%, 90%, 91%, 92%, 93%, 94%, 95%, 96%, 97%, 98%, 99%, or more sequence identity to the reference sequence corresponding to residues 12 to 346 of an even-numbered SEQ ID NO. of SEQ ID NOs: 480-582, to the reference sequence corresponding to an even-numbered SEQ ID NO. of SEQ ID NOs: 480-582, wherein the amino acid sequence comprises one or more substitutions relative to the reference sequence corresponding to residues 12 to 346 of SEQ ID NO: 204, or relative to the reference sequence corresponding to SEQ ID NO: 204.

[0033] In some embodiments, the amino acid sequence of the engineered RNA ligase comprises at least a substitution or substitution set at amino acid position(s) 2/39/69/144/156/316/330, 2/39/69/119/185/316, 69/212/256/330, 39/119/256/316/326/330, 69/116/119/185/330, 2/39/119/144/156/159/202/256/316/326/330, 81/183/185/230, 2/39/69/116/144/156/185, 2/14/39/69/116/119/159/185/256/326, 2/116/119/316, 116/119/144/185/314/316, 39/69/116/144/181/185/256/330, 2/39/69/119/144/156/185/314, 14/39/69/144/156/212/256/314/316/326/330, 39/69/144/156/185/316/330, 156/185/334/335, 39/63/156/230/257/275/330/335, 156/266/316/330/334/335, 39/63/156/183/185/230/330/334, 69/144/316, 116/119/156/202/212/326/330, 39/69/119/138/181/185/316/326, 39/81/156/230, 2/14/69/116/119/144/159/326/330, 39/156/334/345, 230/266/334, 2/116/144/156/159, 156/183/185/230, 2/14/116/316/326/330, 39/63/156/230/316/345, 69/138/144/159/185/202/316, 39/156/257/266/316/334, 156/257/275/334, 183, 89/156/185/230/316/345, 2/14/119, 144/156/316/330, 39/81/185/316/334, 89/230/266/345, 39/156/230/275/316, 39/156/230/266/334/335, 156/185/275/316/330, 119/156/202, 230/257/275/316/330/345, 230, 81/156/330/335/345, 156/183/230/266, 39/185, 39/81/183/275/316/334/345, 156/230/257/316, 39/116/156, or 183/185/257/275/316/330/334, wherein the amino acid positions are relative to the reference sequence corresponding to residues 12 to 346 of SEQ ID NO: 204, or relative to the reference sequence corresponding to SEQ ID NO: 204.

[0034] In some embodiments, the amino acid sequence of the engineered RNA ligase comprises at least one substitution provided in Tables 5.1, 6.1, 7.1, 8.1, 9.1, 10.1, 11.1, and 12.1, wherein the amino acid positions are relative to the reference sequence corresponding to residues 12 to 346 of SEQ ID NO: 14, 42, or 204, or relative to the reference sequence corresponding to SEQ ID NO: 14, 42, or 204.

[0035] In some embodiments, the amino acid sequence of the engineered RNA ligase comprises at least a substitution or substitution set of an RNA ligase variant provided in Tables 5.1, 6.1, 7.1, 8.1, 9.1, 10.1, 11.1, and 12.1, wherein the amino acid positions are relative to the reference sequence corresponding to residues 12 to 346 of SEQ ID NO: 14, 42, or 204, or relative to the reference sequence corresponding to SEQ ID NO: 14, 42, or 204.

[0036] In some embodiments, the engineered RNA ligase comprises an amino acid sequence having least 80%, 81%, 82%, 83%, 84%, 85%, 86%, 87%, 88%, 89%, 90%, 91%, 92%, 93%, 94%, 95%, 96%, 97%, 98%, 99% or more sequence identity to a reference sequence comprising a substitution or substitution set provided in Tables 5.1, 6.1, 7.1, 8.1, 9.1, 10.1, 11.1, and 12.1, wherein the amino acid positions are relative to the reference sequence corresponding to residues 12 to 346 of SEQ ID NO: 14, 42, or 204, or relative to the reference sequence corresponding to SEQ ID NO: 14, 42, or 204.

[0037] In some embodiments, the engineered RNA ligase comprises an amino acid sequence comprising residues 12 to 346 of an even numbered SEQ ID NO. of SEQ ID NOs: 14-582, or an amino acid sequence comprising an even numbered SEQ ID NO. of SEQ ID NOs: 14-582. In some embodiments, the amino acid sequence optionally has 1, 2, 3, 4, 5, 6, 7, 8, 9, or up to 10 substitutions.

[0038] In some embodiments, the engineered RNA ligase comprises an amino acid sequence comprising residues 12 to 346 of SEQ ID NO: 42 or 204, or an amino acid sequence comprising SEQ ID NO: 42 or 204. In some embodiments, the amino acid sequence optionally has 1, 2, 3, 4, 5, 6, 7, 8, 9, or up to 10 substitutions in the amino acid sequence.

[0039] In some embodiments, the engineered RNA ligase has RNA ligase 2 activity. In some embodiments, the engineered RNA ligase has RNA ligase 2 activity and at least one improved property as compared to a reference RNA ligase.

[0040] In some embodiments, the improved property of the engineered RNA ligase is selected from i) increased activity, ii) increased stability, iii) increased thermostability, iv) increased product yield, v) increased activity on polynucleotide substrates containing phosphorothioate internucleotide linkages, vi) increased activity on polynucleotide substrates containing 2′-modifications, vii) increased substrate tolerance, or any combination of i), ii), iii), iv), v), vi), and vii), compared to a reference RNA ligase. In some embodiments, the improved property of the engineered RNA ligase is in comparison to the reference RNA ligase having the sequence corresponding to residues 12 to 346 of SEQ ID NO: 14, 42, or 204, or the sequence corresponding to SEQ ID NO: 14, 42, or 204.

[0041] In some embodiments, the engineered RNA ligase is purified. In some further embodiments, the engineered RNA ligase is provided in solution, as a lyophilizate, or immobilized on a substrate, such as solid substrates, porous substrates, membranes or particles.

[0042] In another aspect, the present disclosure provides a recombinant polynucleotide comprising a polynucleotide sequence encoding the engineered RNA ligases disclosed herein.

[0043] In some embodiments, the recombinant polynucleotide comprises a polynucleotide sequence encoding an engineered RNA ligase comprising an amino acid sequence having at least 80%, 81%, 82%, 83%, 84%, 85%, 86%, 87%, 88%, 89%, 90%, 91%, 92%, 93%, 94%, 95%, 96%, 97%, 98%, 99%, or more sequence identity to a reference sequence corresponding to residues 12 to 346 of an even-numbered SEQ ID NO. of SEQ ID NOs: 14 and 24-582, or to a reference sequence corresponding to an even-numbered SEQ ID NO. of SEQ ID NOs: 14 and 24-582, wherein the amino acid sequence comprises one or more substitutions relative to the reference sequence corresponding to residues 12 to 346 of SEQ ID NO: 14, 42, or 204, or relative to the reference sequence corresponding to SEQ ID NO: 14, 42, or 204.

[0044] In some embodiments, the recombinant polynucleotide comprises a polynucleotide sequence encoding an engineered RNA ligase comprising an amino acid sequence having at least 80%, 81%, 82%, 83%, 84%, 85%, 86%, 87%, 88%, 89%, 90%, 91%, 92%, 93%, 94%, 95%, 96%, 97%, 98%, 99%, or more sequence identity to the reference sequence corresponding to residues 12 to 346 of SEQ ID NO: 14, 42, or 204, or to the reference sequence corresponding to SEQ ID NO: 14, 42, or 204, wherein the amino acid sequence comprises one or more substitutions relative to the reference sequence corresponding to residues 12 to 346 of SEQ ID NO: 14, 42, or 204, or relative to the reference sequence corresponding to SEQ ID NO: 14, 42, or 204.

[0045] In some embodiments, the recombinant polynucleotide comprises a polynucleotide sequence encoding an engineered RNA ligase comprising an amino acid sequence having at least 80%, 81%, 82%, 83%, 84%, 85%, 86%, 87%, 88%, 89%, 90%, 91%, 92%, 93%, 94%, 95%, 96%, 97%, 98%, 99%, or more sequence identity to the reference sequence corresponding to residues 12 to 346 of SEQ ID NO: 14, or to the reference sequence corresponding to SEQ ID NO: 14, wherein the amino acid sequence comprises one or more substitutions relative to the reference sequence corresponding to residues 12 to 346 of SEQ ID NO: 14, or relative to the reference sequence corresponding to SEQ ID NO: 14.

[0046] In some embodiments, the recombinant polynucleotide comprises a polynucleotide sequence encoding an engineered RNA ligase comprising an amino acid sequence having at least 80%, 81%, 82%, 83%, 84%, 85%, 86%, 87%, 88%, 89%, 90%, 91%, 92%, 93%, 94%, 95%, 96%, 97%, 98%, 99%, or more sequence identity to the reference sequence corresponding to residues 12 to 346 of SEQ ID NO: 42, or to the reference sequence corresponding to SEQ ID NO: 42, wherein the amino acid sequence comprises one or more substitutions relative to the reference sequence corresponding to residues 12 to 346 of SEQ ID NO: 42, or relative to the reference sequence corresponding to SEQ ID NO: 42.

[0047] In some embodiments, the recombinant polynucleotide comprises a polynucleotide sequence encoding an engineered RNA ligase comprising an amino acid sequence having at least 80%, 81%, 82%, 83%, 84%, 85%, 86%, 87%, 88%, 89%, 90%, 91%, 92%, 93%, 94%, 95%, 96%, 97%, 98%, 99%, or more sequence identity to the reference sequence corresponding to residues 12 to 346 of SEQ ID NO: 204, or to the reference sequence corresponding to SEQ ID NO: 204, wherein the amino acid sequence comprises one or more substitutions relative to the reference sequence corresponding to residues 12 to 346 of SEQ ID NO: 204, or relative to the reference sequence corresponding to SEQ ID NO: 204.

[0048] In some embodiments, the recombinant polynucleotide comprising a polynucleotide sequence having at least 70%, 75%, 75%, 80%, 81%, 82%, 83%, 84%, 85%, 90%, 91%, 92%, 93%, 94%, 95%, 96%, 97%, 98%, 99%, or more sequence identity to a reference polynucleotide sequence corresponding to nucleotide residues 34 to 1038 of SEQ ID NO: 13, 41, or 203, or to a reference polynucleotide sequence corresponding to SEQ ID NO: 13, 41, or 203, wherein the recombinant polynucleotide encodes an RNA ligase.

[0049] In some embodiments, the recombinant polynucleotide comprises a polynucleotide sequence having at least 70%, 75%, 80%, 81%, 82%, 83%, 84%, 85%, 90%, 91%, 92%, 93%, 94%, 95%, 96%, 97%, 98%, 99%, or more sequence identity to a reference polynucleotide sequence corresponding to nucleotide residues 34 to 1038 of an odd numbered SEQ ID NO. of SEQ ID NOs: 23-581, or to a reference polynucleotide sequence corresponding an odd numbered SEQ ID NO. of SEQ ID NOs: 23-581, wherein the recombinant polynucleotide encodes an RNA ligase.

[0050] In some embodiments, the polynucleotide sequence of the recombinant polynucleotide encoding an engineered RNA ligase is codon optimized for expression in an organism or cell type thereof, for example a bacterial cell, a fungal cell, insect cell, or mammalian cell.

[0051] In some embodiments, the recombinant polynucleotide comprises a polynucleotide sequence comprising nucleotide residues 34 to 1038 of SEQ ID NO. 13, 41, or 203, or a polynucleotide sequence comprising SEQ ID NOs: 13, 41, or 203.

[0052] In some embodiments, the recombinant polynucleotide comprises a polynucleotide sequence comprising nucleotide residues 34 to 1038 of an odd numbered SEQ ID NO. of SEQ ID NOs: 23-581, or a polynucleotide sequence comprising an odd numbered SEQ ID NO. of SEQ ID NOs: 23-581.

[0053] In a further aspect, the present disclosure provides expression vectors comprising at least one recombinant polynucleotide provided herein encoding an engineered RNA ligase. In some embodiments, the recombinant polynucleotide of the expression vector is operably linked to a control sequence. In some embodiments, the control sequence comprises a promoter, particularly a heterologous promoter.

[0054] In another aspect, the present disclosure also provides a host cell comprising at least one expression vector provided herein. In some embodiments, the host cell is a prokaryotic cell or a eukaryotic cell. In some embodiments, the host cell is a bacterial cell, fungal cell, insect cell, or mammalian cell. In some preferred embodiments, the host cell is a bacterial cell, such as E. coli. or B. subtilis.

[0055] In a further aspect, the present disclosure provides a method of producing an engineered RNA ligase polypeptide, the method comprising culturing a host cell described herein under suitable culture conditions such that at least one engineered RNA ligase is produced. In some embodiments, the method further comprises recovering or isolating the engineered RNA ligase from the culture and/or host cells. In some embodiments, the method further comprises the step of purifying the engineered RNA ligase.

[0056] In another aspect, the present disclosure provides a composition comprising at least one engineered RNA ligase disclosed herein. In some embodiments, the composition comprises at least a buffer. In some embodiments, the composition further comprises a nucleotide substrate (e.g., ATP or dATP) and one or more of polynucleotide substrates, such as synthetic polynucleotides, particularly modified polynucleotides.

[0057] In a further aspect, the present disclosure provides a method of ligating at least a first polynucleotide strand and a second polynucleotide strand, comprising contacting the first polynucleotide strand and a second polynucleotide strand with an engineered RNA ligase described herein in presence of a nucleotide substrate under conditions suitable for ligation of the first polynucleotide strand to the second polynucleotide strand, wherein the first polynucleotide strand comprises a ligatable 5′-end and the second polynucleotide strand comprises a 3′-end ligatable to the 5-end of the first polynucleotide strand. In some embodiments, the first polynucleotide strand and/or second polynucleotide strand comprises RNA or a mixture of RNA and DNA.

[0058] In some embodiments, the method further comprises a third polynucleotide strand, wherein the first polynucleotide strand and second polynucleotide strand hybridize adjacent to one another on the third polynucleotide to position the 5′-end of the first polynucleotide strand adjacent to the 3′-end of the second polynucleotide strand to form a nick. In some embodiments, the third polynucleotide strand is continuous with the first polynucleotide strand or second polynucleotide strand. In some embodiments, the third polynucleotide strand is continuous with the first polynucleotide strand and second polynucleotide strand to form a single continuous polynucleotide substrate.

[0059] In some embodiments, 3′-end region of the second polynucleotide strand that hybridizes to the third polynucleotide strand is at least 4, 6, 8 or more base pairs in length. In some embodiments, the 5-end region of the first polynucleotide strand that hybridizes to the third polynucleotide strand is at least 4, 6, 8 or more base pairs in length.

[0060] In some embodiments of the method, the third polynucleotide strand comprises a splint or bridging polynucleotide, wherein the 5′-terminal sequence of the first polynucleotide strand and the 3′-terminal sequence of the second polynucleotide strand hybridize adjacent to one another on the splint or bridging polynucleotide to position the 5′-end of the first polynucleotide strand adjacent to the 3′-end of the second polynucleotide strand.

[0061] In some embodiments, the first and third polynucleotide strands hybridize to each other to form a first double stranded polynucleotide fragment, and the second polynucleotide strand hybridizes to a fourth polynucleotide strand to form a second double stranded fragment, wherein the first and second double stranded fragments have complementary ends that can base pair to form substrates for the engineered RNA ligase.

[0062] In some embodiments, the engineered RNA ligase is used in a method to synthesize RNA or DNA/RNA polynucleotides by ligation of shorter RNA or DNA/RNA oligonucleotides. In some embodiments, the engineered RNA ligase is used to ligate the 3′ OH of RNA to the 5′ phosphate of DNA or RNA. In some embodiments, the engineered RNA ligase is used to ligate the 3′ OH of RNA to the 5′ phosphate of DNA in a double-stranded-format NGS RNA library construction. In some embodiments, the engineered RNA ligase is used in a method of preparing RNA rings. In some embodiments, the engineered RNA ligase is used to repair nicks in dsRNA or dsRNA/DNA.

[0063] In a further aspect, the present disclosure also provides a kit comprising at least one engineered RNA ligase disclosed herein. In some embodiments, the kit further comprises one or more of a buffer, nucleotide substrate (e.g., ATP or dATP), and/or one or more polynucleotide substrates.

### DETAILED DESCRIPTION

[0064] The present disclosure provides engineered RNA ligase polypeptides and compositions thereof, as well as polynucleotides encoding the engineered RNA ligase polypeptides. The disclosure also provides methods of using of the engineered RNA ligase polypeptides and compositions thereof for molecular biological, diagnostic, and other purposes. In some embodiments, the engineered RNA ligase polypeptides display, among others, increased activity, increased stability, increased product yield, increased thermal stability, and/or increased activity on polynucleotides containing one or more modified nucleotides or nucleotide analogs.

### Abbreviations and Definitions

[0065] Unless defined otherwise, all technical and scientific terms used herein generally have the same meaning as commonly understood by one of ordinary skill in the art to which this invention pertains. Generally, the nomenclature used herein and the laboratory procedures of cell culture, molecular genetics, microbiology, organic chemistry, analytical chemistry and nucleic acid chemistry described below are those well-known and commonly employed in the art. Such techniques are well known and described in numerous texts and reference works well known to those of skill in the art. Standard techniques, or modifications thereof, are used for chemical syntheses and chemical analyses.

[0066] Although any suitable methods and materials similar or equivalent to those described herein find use in the practice of the present invention, exemplary methods and materials are described herein. It is to be understood that the present invention is not limited to the particular methodology, protocols, and reagents described, as these may vary, depending upon the context they are used by those of skill in the art. Accordingly, the terms defined immediately below are more fully described by reference to the application as a whole.

[0067] As used herein, the singular “a,” “an,” and “the” include the plural references, unless the context clearly indicates otherwise.

[0068] As used herein, the term “comprising” and its cognates are used in their inclusive sense (i.e., equivalent to the term “including” and its corresponding cognates).

[0069] It is also to be understood that where description of embodiments use the term “comprising” and its cognates, the embodiments can also be described using language “consisting essentially of” or “consisting of.”

[0070] Moreover, numeric ranges are inclusive of the numbers defining the range. Thus, every numerical range disclosed herein is intended to encompass every narrower numerical range that falls within such broader numerical range, as if such narrower numerical ranges were all expressly written herein. It is also intended that every maximum (or minimum) numerical limitation disclosed herein includes every lower (or higher) numerical limitation, as if such lower (or higher) numerical limitations were expressly written herein.

[0071] As used herein, the term “about” means an acceptable error for a particular value. In some instances, “about” means within 0.05%, 0.5%, 1.0%, or 2.0%, of a given value range. In some instances, “about” means within 1, 2, 3, or 4 standard deviations of a given value.

[0072] Furthermore, the headings provided herein are not limitations of the various aspects or embodiments of the invention which can be had by reference to the application as a whole. Accordingly, the terms defined immediately below are more fully defined by reference to the application as a whole.

[0073] “EC” number refers to the Enzyme Nomenclature of the Nomenclature Committee of the International Union of Biochemistry and Molecular Biology (NC-IUBMB). The IUBMB biochemical classification is a numerical classification system for enzymes based on the chemical reactions they catalyze.

[0074] “ATCC” refers to the American Type Culture Collection whose biorepository collection includes genes and strains.

[0075] “NCBI” refers to National Center for Biological Information and the sequence databases provided therein.

[0076] “Protein,” “polypeptide,” and “peptide” are used interchangeably to denote a polymer of at least two amino acids covalently linked by an amide bond, regardless of length or post-translational modification (e.g., glycosylation or phosphorylation).

[0077] “Amino acids” and “amino acid” are referred to herein by either their commonly known three-letter symbols or by the one-letter symbols recommended by IUPAC-IUB Biochemical Nomenclature Commission. The abbreviations used for the genetically encoded amino acids are conventional and are as follows: alanine (Ala or A), arginine (Arg or R), asparagine (Asn or N), aspartate (Asp or D), cysteine (Cys or C), glutamate (Glu or E), glycine (Gly or G), glutamine (Gln or Q), histidine (His or H), isoleucine (Ile or I), leucine (Leu or L), lysine (Lys or K), methionine (Met or M), phenylalanine (Phe or F), proline (Pro or P), serine (Ser or S), threonine (Thr or T), tryptophan (Trp or W), tyrosine (Tyr or Y), and valine (Val or V). When the three-letter abbreviations are used, unless specifically preceded by an “L” or a “D” or clear from the context in which the abbreviation is used, the amino acid may be in either the L- or D-configuration about α-carbon (C_{α}). For example, whereas “Ala” designates alanine without specifying the configuration about the α-carbon, “D-Ala” and “L-Ala” designate D-alanine and L-alanine, respectively. When the one-letter abbreviations are used, upper case letters designate amino acids in the L-configuration about the α-carbon and lower case letters designate amino acids in the D-configuration about the α-carbon. For example, “A” designates L-alanine and “a” designates D-alanine. When polypeptide sequences are presented as a string of one-letter or three-letter abbreviations (or mixtures thereof), the sequences are presented in the amino (N) to carboxy (C) direction in accordance with common convention.

[0078] “Fusion protein,” and “chimeric protein” and “chimera” refer to hybrid proteins created through the joining of two or more polynucleotides that originally encode separate proteins. In some embodiments, fusion proteins are created by recombinant technology (e.g., molecular biology techniques known in the art).

[0079] “RNA ligase” refers to enzymes that covalently joins the 5′-phosphoryl termini of RNA or DNA to the 3′-hydroxyl termini of RNA or DNA. Two families of RNA ligases are known to occur in nature. RNA ligase 1 catalyzes the covalent joining of single stranded 5′-phosphoryl termini of RNA or DNA to single stranded 3-hydroxyl termini of RNA or DNA. RNA ligase 2 also catalyzes the covalent joining of a 3′-hydroxyl terminus of RNA to a 5′-phosphorylated RNA or DNA but shows preference for double stranded substrates. In some embodiments, RNA ligases include those enzymes classified in EC 6.5.1.3.

[0080] Without being bound by any theory of operation, although some DNA ligases are capable of acting on either DNA or RNA as the 3′-hydroxyl strand substrate, an RNA ligase 2 acting at a duplex nick preferentially acts on 3′-hydroxyl strand of RNA but is agnostic to whether 5-phosphoryl strand is DNA or RNA. Moreover, in some embodiments, the strand with the 3′-hydroxyl may include deoxyribonucleotides if sufficient number of ribonucleotides are present at the 3′-hydroxyl terminus. For example, the RNA specificity of T4 RNA ligase 2 is affected by the 3′-hydroxyl strand, and specifically by the two terminal ribonucleotides of the 3-′hydroxyl side of the nick (see, e.g., Nandakumar et al., Mol. Cell., 2004, 16:211-221). It is to be understood that the ligation reaction is not limited to naturally occurring RNA and DNA substrates also includes polynucleotide substrates that contain modified nucleotides and/or nucleotide analogs.

[0081] “Polynucleotide,” “nucleic acid,” or “oligonucleotide” is used herein to denote a polymer comprising at least two nucleotides where the nucleotides are either deoxyribonucleotides or ribonucleotides or mixtures of deoxyribonucleotides and ribonucleotides. In some embodiments, the abbreviations used for genetically encoding nucleosides are conventional and are as follow: adenosine (A); guanosine (G); cytidine (C); thymidine (T); and uridine (U). Unless specifically delineated, the abbreviated nucleosides may be either ribonucleosides or 2′-deoxyribonucleosides. The nucleosides may be specified as being either ribonucleosides or 2′-deoxyribonucleosides on an individual basis or on an aggregate basis. When a polynucleotide, nucleic acid, or oligonucleotide sequences are presented as a string of one-letter abbreviations, the sequences are presented in the 5′ to 3′ direction in accordance with common convention, and the phosphates are not indicated. The term “DNA” refers to deoxyribonucleic acid. The term “RNA” refers to ribonucleic acid. The polynucleotide or nucleic acid may be single-stranded or double-stranded, or may include both single-stranded regions and double-stranded regions.

[0082] In some embodiments, the terms “polynucleotide,” “nucleic acid” and “oligonucleotide” encompasses polynucleotide or nucleic acid or oligonucleotide analogs, which include, among others, nucleosides linked together via other than standard phosphodiester linkages, such as non-standard linkages of phosphoramidates, phosphorothioates, amide linkages, etc.; nucleosides with modified and/or synthetic nucleobases, for example inosine, xanthine, hypoxanthine, etc.; nucleosides with modified sugar residues, such as 2′-O-alkyl, 2′-halo, 2,3-dideoxy, 2′-halo-2′deoxy, 3-D-ribo LNA, α-L-ribo-LNA (locked nucleic acids), etc.; and/or 5′-phosphate analogs, including, among others, phosphorothioate, phosphoacetate, phosphoramidate, monomethylphosphate, methylphosphonate, or phosphonocarboxylate.

[0083] “Duplex” and “ds” refer to a double-stranded nucleic acid (e.g., DNA or RNA) molecule comprised of two single-stranded polynucleotides that are complementary in their sequence (e.g., A pairs to T or U, C pairs to G), arranged in an antiparallel 5′ to 3′ orientation, and held together by hydrogen bonds between the nucleobases (e.g., adenine [A], guanine [G], cytosine [C], thymine [T], uridine [U]).

[0084] “Complementary” is used herein to describe the structural relationship between nucleotide bases that are capable of forming base pairs with one another. For example, a purine nucleotide base present on a polynucleotide that is complementary to a pyrimidine nucleotide base on a polynucleotide may base pair by forming hydrogen bonds with one another. Complementary nucleotide bases can base pair via Watson/Crick base pairing or in any other manner than forms stable duplexes or other nucleic acid structures.

[0085] “Watson/Crick Base-Pairing” refers to a pattern of specific pairs of nucleobases and analogs that bind together through sequence-specific hydrogen-bonds, e.g. A pairs with T or U, and G pairs with C.

[0086] “Annealing” or “Hybridization” refers to the base-pairing interactions of one nucleobase polymer (e.g., poly- and oligonucleotides) with another that results in the formation of a double-stranded structure, a triplex structure or a quaternary structure. Annealing or hybridization can occur via Watson-Crick base-pairing interactions, but may be mediated by other hydrogen-bonding interactions, such as Hoogsteen base pairing. In some embodiments, the nucleobase polymer that anneals or hybridizes to another is a single nucleobase polymer while in other embodiments, the nucleobase polymers are separate nucleobase polymers.

[0087] “Engineered,” “recombinant,” “non-naturally occurring,” and “variant,” when used with reference to a cell, a polynucleotide or a polypeptide refer to a material or a material corresponding to the natural or native form of the material that has been modified in a manner that would not otherwise exist in nature or is identical thereto but produced or derived from synthetic materials and/or by manipulation using recombinant techniques.

[0088] “Wild-type” and “naturally-occurring” refer to the form found in nature. For example, a wild-type polypeptide or polynucleotide sequence is a sequence present in an organism that can be isolated from a source in nature and which has not been intentionally modified by human manipulation.

[0089] “Coding sequence” and synonymously “encoding” refers to that part of a nucleic acid (e.g., a gene) that encodes an amino acid sequence of a protein.

[0090] “Percent (%) sequence identity” refers to comparisons among polynucleotides and polypeptides, and are determined by comparing two optimally aligned sequences over a comparison window, wherein the portion of the polynucleotide or polypeptide sequence in the comparison window may comprise additions or deletions (i.e., gaps) as compared to the reference sequence for optimal alignment of the two sequences. The percentage may be calculated by determining the number of positions at which the identical nucleic acid base or amino acid residue occurs in both sequences to yield the number of matched positions, dividing the number of matched positions by the total number of positions in the window of comparison and multiplying the result by 100 to yield the percentage of sequence identity. Alternatively, the percentage may be calculated by determining the number of positions at which either the identical nucleic acid base or amino acid residue occurs in both sequences or a nucleic acid base or amino acid residue is aligned with a gap to yield the number of matched positions, dividing the number of matched positions by the total number of positions in the window of comparison and multiplying the result by 100 to yield the percentage of sequence identity. Those of skill in the art appreciate that there are many established algorithms available to align two sequences. Optimal alignment of sequences for comparison can be conducted, e.g., by the local homology algorithm of Smith and Waterman (Smith and Waterman, Adv. Appl. Math., 1981, 2:482), by the homology alignment algorithm of Needleman and Wunsch (Needleman and Wunsch, J. Mol. Biol., 1970, 48:443), by the search for similarity method of Pearson and Lipman (Pearson and Lipman, Proc. Natl. Acad. Sci. USA, 1988, 85:2444), by computerized implementations of these algorithms (e.g., GAP, BESTFIT, FASTA, and TFASTA in the GCG Wisconsin Software Package), or by visual inspection, as known in the art. Examples of algorithms that are suitable for determining percent sequence identity and sequence similarity include, but are not limited to the BLAST and BLAST 2.0 algorithms (see, e.g., Altschul et al., J. Mol. Biol., 1990, 215: 403-410; and Altschul et al., Nucleic Acids Res., 1977, 3389-3402). Software for performing BLAST analyses is publicly available through the National Center for Biotechnology Information website. This algorithm involves first identifying high scoring sequence pairs (HSPs) by identifying short words of length “W” in the query sequence, which either match or satisfy some positive-valued threshold score “T,” when aligned with a word of the same length in a database sequence. T is referred to as the neighborhood word score threshold (see Altschul et al, supra). These initial neighborhood word hits act as seeds for initiating searches to find longer HSPs containing them. The word hits are then extended in both directions along each sequence for as far as the cumulative alignment score can be increased. Cumulative scores are calculated using, for nucleotide sequences, the parameters “M” (reward score for a pair of matching residues; always >0) and “N” (penalty score for mismatching residues; always <0). For amino acid sequences, a scoring matrix is used to calculate the cumulative score. Extension of the word hits in each direction are halted when: the cumulative alignment score falls off by the quantity “X” from its maximum achieved value; the cumulative score goes to zero or below, due to the accumulation of one or more negative-scoring residue alignments; or the end of either sequence is reached. The BLAST algorithm parameters W, T, and X determine the sensitivity and speed of the alignment. The BLASTN program (for nucleotide sequences) uses as defaults a wordlength (W) of 11, an expectation (E) of 10, M=5, N=−4, and a comparison of both strands. For amino acid sequences, the BLASTP program uses as defaults a wordlength (W) of 3, an expectation (E) of 10, and the BLOSUM62 scoring matrix (see, e.g., Henikoff and Henikoff, Proc. Natl. Acad. Sci. USA, 1989, 89:10915). Exemplary determination of sequence alignment and % sequence identity can employ the BESTFIT or GAP programs in the GCG Wisconsin Software package (Accelrys, Madison WI), using default parameters provided.

[0091] “Reference sequence” refers to a defined sequence used as a basis for a sequence comparison. A reference sequence may be a subset of a larger sequence, for example, a segment of a full-length gene or polypeptide sequence. Generally, a reference sequence is at least 20 nucleotide or amino acid residues in length, at least 25 residues in length, at least 50 residues in length, at least 100 residues in length or the full length of the nucleic acid or polypeptide. Since two polynucleotides or polypeptides may each (1) comprise a sequence (i.e., a portion of the complete sequence) that is similar between the two sequences, and (2) may further comprise a sequence that is divergent between the two sequences, sequence comparisons between two (or more) polynucleotides or polypeptide are typically performed by comparing sequences of the two polynucleotides or polypeptides over a “comparison window” to identify and compare local regions of sequence similarity. In some embodiments, a “reference sequence” can be based on a primary amino acid sequence, where the reference sequence is a sequence that can have one or more changes in the primary sequence. For instance, the phrase “a reference sequence corresponding to SEQ ID NO: 14, having a lysine at the residue corresponding to X14” (or “a reference sequence corresponding to SEQ ID NO: 14, having a lysine at the residue corresponding to position 14”) refers to a reference sequence in which the corresponding residue at position X14 in SEQ ID NO: 14 (e.g., an alanine), has been changed to lysine.

[0092] “Comparison window” refers to a conceptual segment of contiguous nucleotide positions or amino acids residues wherein a sequence may be compared to a reference sequence. In some embodiments, the comparison window is at least 15 to 20 contiguous nucleotides or amino acids and wherein the portion of the sequence in the comparison window may comprise additions or deletions (i.e., gaps) of 20 percent or less as compared to the reference sequence (which does not comprise additions or deletions) for optimal alignment of the two sequences. In some embodiments, the comparison window can be longer than 15-20 contiguous residues, and includes, optionally 30, 40, 50, 100, or longer windows.

[0093] “Corresponding to”, “reference to,” and “relative to” when used in the context of the numbering of a given amino acid or polynucleotide sequence refer to the numbering of the residues of a specified reference sequence when the given amino acid or polynucleotide sequence is compared to the reference sequence. In other words, the residue number or residue position of a given polymer is designated with respect to the reference sequence rather than by the actual numerical position of the residue within the given amino acid or polynucleotide sequence. For example, a given amino acid sequence, such as that of an engineered RNA ligase, can be aligned to a reference sequence by introducing gaps to optimize residue matches between the two sequences. In these cases, although the gaps are present, the numbering of the residue in the given amino acid or polynucleotide sequence is made with respect to the reference sequence to which it has been aligned. In some embodiments, the sequence is tagged (e.g., with a histidine tag).

[0094] “Mutation” refers to the alteration of a nucleic acid sequence. In some embodiments, mutations result in changes to the encoded polypeptide sequence (i.e., as compared to the original sequence without the mutation). In some embodiments, the mutation comprises a substitution, such that a different amino acid is produced. In some alternative embodiments, the mutation comprises an addition, such that an amino acid is added (e.g., insertion) to the original polypeptide sequence. In some further embodiments, the mutation comprises a deletion, such that an amino acid is deleted from the original polypeptide sequence. Any number of mutations may be present in a given sequence.

[0095] “Amino acid difference” and “residue difference” refer to a difference in the amino acid residue at a position of a polypeptide sequence relative to the amino acid residue at a corresponding position in a reference sequence. The amino acid positions of amino acid differences generally are referred to herein as “Xn,” where n refers to the corresponding position in the reference sequence upon which the residue difference is based. For example, a “residue difference at position X14 as compared to SEQ ID NO: 14” (or a “residue difference at position 14 as compared to SEQ ID NO: 14”) refers to a difference of the amino acid residue at the polypeptide position corresponding to position 14 of SEQ ID NO: 14. Thus, if the reference polypeptide of SEQ ID NO: 14 has a alanine at position 14, then a “residue difference at position X14 as compared to SEQ ID NO: 14” refers to an amino acid substitution of any residue other than alanine at the position of the polypeptide corresponding to position 14 of SEQ ID NO: 14. In some instances herein, the specific amino acid residue difference at a position is indicated as “XnY” where “Xn” specified the corresponding residue and position of the reference polypeptide (as described above), and “Y” is the single letter identifier of the amino acid found in the engineered polypeptide (i.e., the different residue than in the reference polypeptide). In some instances (e.g., in the Tables in the Examples), the present disclosure also provides specific amino acid differences denoted by the conventional notation “AnB”, where A is the single letter identifier of the residue in the reference sequence, “n” is the number of the residue position in the reference sequence, and B is the single letter identifier of the residue substitution in the sequence of the engineered polypeptide. In some embodiments, the amino acid difference, e.g., a substitution, is denoted by the abbreviation “nB,” without the identifier for the residue in the reference sequence. In some instances, an amino acid residue difference or substitution may be a deletion and may be denoted by a “−”. In some embodiments, the phrase “an amino acid residue nB” denotes the presence of the amino acid residue in the engineered polypeptide, which may or may not be a substitution in context of a reference polypeptide or amino acid sequence.

[0096] In some instances, a polypeptide of the present disclosure can include one or more amino acid residue differences relative to a reference sequence, which is indicated by a list of the specified positions where residue differences are present relative to the reference sequence. In some embodiments, where more than one amino acid can be used in a specific residue position of a polypeptide, the various amino acid residues that can be used are separated by a “/” (e.g., X39Q/X39S, X39Q/S, or 39Q/S). The present disclosure includes engineered polypeptide sequences comprising one or more amino acid differences that include either/or both conservative and non-conservative amino acid substitutions, as well as insertions and deletions of amino acids in the sequence.

[0097] “Amino acid substitution set” and “substitution set” refers to a group of amino acid substitutions within a polypeptide sequence. In some embodiments, substitution sets comprise 2, 3, 4, 5, 6, 7, 8, 9, 10, 11, 12, 13, 14, 15, or more amino acid substitutions. In some embodiments, a substitution set refers to the set of amino acid substitutions that is present in any of the variant RNA ligase polypeptides listed in any of the Tables in the Examples. In these substitution sets, the individual substitutions are separated by a semicolon (“;”; e.g., M95V;V177P) or slash (“/”; e.g., M95V/V177P or 95V/177P).

[0098] “Conservative amino acid substitution” refers to a substitution of a residue with a different residue having a similar side chain, and thus typically involves substitution of the amino acid in the polypeptide with amino acids within the same or similar defined class of amino acids. By way of example and not limitation, an amino acid with an aliphatic side chain may be substituted with another aliphatic amino acid (e.g., alanine, valine, leucine, and isoleucine); an amino acid with hydroxyl side chain is substituted with another amino acid with a hydroxyl side chain (e.g., serine and threonine); an amino acids having aromatic side chains is substituted with another amino acid having an aromatic side chain (e.g., phenylalanine, tyrosine, tryptophan, and histidine); an amino acid with a basic side chain is substituted with another amino acid with a basis side chain (e.g., lysine and arginine); an amino acid with an acidic side chain is substituted with another amino acid with an acidic side chain (e.g., aspartic acid or glutamic acid); and a hydrophobic or hydrophilic amino acid is replaced with another hydrophobic or hydrophilic amino acid, respectively.

[0099] “Non-conservative substitution” refers to substitution of an amino acid in the polypeptide with an amino acid with significantly differing side chain properties. Non-conservative substitutions may use amino acids between, rather than within, the defined groups and affect: (a) the structure of the peptide backbone in the area of the substitution (e.g., proline for glycine); (b) the charge or hydrophobicity; and/or (c) the bulk of the side chain. By way of example and not limitation, exemplary non-conservative substitutions include an acidic amino acid substituted with a basic or aliphatic amino acid; an aromatic amino acid substituted with a small amino acid; and a hydrophilic amino acid substituted with a hydrophobic amino acid.

[0100] “Deletion” refers to modification to the polypeptide by removal of one or more amino acids from the reference polypeptide. Deletions can comprise removal of 1 or more amino acids, 2 or more amino acids, 5 or more amino acids, 10 or more amino acids, 15 or more amino acids, or 20 or more amino acids, up to 10% of the total number of amino acids, or up to 20% of the total number of amino acids making up the reference polypeptide while retaining enzymatic activity and/or retaining the improved properties of an engineered RNA ligase. Deletions can be directed to the internal portions and/or terminal portions of the polypeptide. In various embodiments, the deletion can comprise a continuous segment or can be discontinuous. As noted above, deletions are indicated by “−”, and may be present in substitution sets.

[0101] “Insertion” refers to modification to the polypeptide by addition of one or more amino acids from the reference polypeptide. Insertions can be in the internal portions of the polypeptide, or to the carboxy or amino terminus. Insertions as used herein include fusion proteins as is known in the art. The insertion can be a contiguous segment of amino acids or separated by one or more of the amino acids in the naturally occurring polypeptide.

[0102] “Functional fragment” and “biologically active fragment” are used interchangeably herein, to refer to a polypeptide that has an amino-terminal and/or carboxy-terminal deletion(s) and/or internal deletions, but where the remaining amino acid sequence is identical to the corresponding positions in the sequence to which it is being compared (e.g., a full length engineered RNA ligase of the present invention) and that retains substantially all of the activity of the full-length polypeptide.

[0103] “Isolated polypeptide” refers to a polypeptide which is substantially separated from other contaminants that naturally accompany it (e.g., protein, lipids, and polynucleotides). The term embraces polypeptides which have been removed or purified from their naturally-occurring environment or expression system (e.g., host cell or in vitro synthesis). The recombinant RNA ligase polypeptides may be present within a cell, present in the cellular medium, or prepared in various forms, such as lysates or isolated preparations. As such, in some embodiments, the recombinant RNA ligase polypeptides provided herein are isolated polypeptides.

[0104] “Substantially pure polypeptide” or “purified” refers to a composition in which the polypeptide species is the predominant species present (i.e., on a molar or weight basis it is more abundant than any other individual macromolecular species in the composition), and is generally a substantially purified composition when the object species comprises at least about 50 percent of the macromolecular species present by mole or % weight. Generally, a substantially pure RNA ligase composition will comprise about 60% or more, about 70% or more, about 80% or more, about 90% or more, about 95% or more, and about 98% or more of all macromolecular species by mole or % weight present in the composition. In some embodiments, the object species is purified to essential homogeneity (i.e., contaminant species cannot be detected in the composition by conventional detection methods) wherein the composition consists essentially of a single macromolecular species. Solvent species, small molecules (<500 Daltons), and elemental ion species are not considered macromolecular species. In some embodiments, the isolated recombinant RNA ligase polypeptides are substantially pure polypeptide compositions.

[0105] “Improved enzyme property” refers to an engineered RNA ligase polypeptide that exhibits an improvement in any enzyme property as compared to a reference RNA ligase polypeptide, such as a wild-type RNA ligase polypeptide (e.g., the RNA ligase polypeptide sequence of SEQ ID NO: 2 or 14) or another engineered RNA ligase polypeptide. Improved properties include but are not limited to such properties as increased enzymatic activity, increased product yield, increased protein expression, increased thermoactivity, increased thermostability, increased stability, increased substrate specificity and/or affinity, increased substrate range, increased specific activity, increased resistance to substrate and/or end-product inhibition, increased chemical stability, improved solvent stability, increased solubility, and increased inhibitor resistance or tolerance. Exemplary improved properties are provided in the Examples.

[0106] “Increased enzymatic activity” and “enhanced catalytic activity” refer to an improved property of the engineered RNA ligase polypeptides, which can be represented by an increase in specific activity (e.g., product produced/time/weight protein) and/or an increase in percent conversion of the substrate to the product (e.g., percent conversion of starting amount of substrate to product in a specified time period using a specified amount of RNA ligase) as compared to the reference RNA ligase enzyme (e.g., wild-type RNA ligase and/or another engineered RNA ligase). Exemplary methods to determine enzyme activity are provided in the Examples. Any property relating to enzyme activity may be affected, including the classical enzyme properties of Kₘ, Vₘₐₓ or k_{cat}, changes of which can lead to increased enzymatic activity. Improvements in enzyme activity can be from about 1.1 fold the enzymatic activity of the corresponding wild-type enzyme, to about 1.5 fold, 2-fold, 5-fold, 10-fold, 20-fold, 25-fold, 50-fold, 75-fold, 100-fold, 150-fold, 200-fold or more enzymatic activity than the naturally occurring RNA ligase or another engineered RNA ligase from which the RNA ligase polypeptides were derived.

[0107] “Hybridization stringency” relates to hybridization conditions, such as washing conditions, in the hybridization of nucleic acids. Generally, hybridization reactions are performed under conditions of lower stringency, followed by washes of varying but higher stringency (see, e.g., Sambrook et al., Molecular Cloning: A Laboratory Manual, Cold Spring Harbor Laboratory Press, New York, 2001; Ausubel et al., Current Protocols in Molecular Biology, John Wiley & Sons, 2003). The term “moderately stringent hybridization” refers to conditions that permit target-DNA to bind a complementary nucleic acid that has about 60% identity, preferably about 75% identity, about 85% identity to the target DNA, with greater than about 90% identity to target-polynucleotide. Exemplary moderately stringent conditions are conditions equivalent to hybridization in 50% formamide, 5×Denhart's solution, 5×SSPE, 0.2% SDS at 42° C., followed by washing in 0.2×SSPE, 0.2% SDS, at 42° C. “High stringency hybridization” refers generally to conditions that are about 10° C. or less from the thermal melting temperature Tₘ as determined under the solution condition for a defined polynucleotide sequence. In some embodiments, a high stringency condition refers to conditions that permit hybridization of only those nucleic acid sequences that form stable hybrids in 0.018M NaCl at 65° C. (i.e., if a hybrid is not stable in 0.018M NaCl at 65° C., it will not be stable under high stringency conditions, as contemplated herein). High stringency conditions can be provided, for example, by hybridization in conditions equivalent to 50% formamide, 5×Denhart's solution, 5×SSPE, 0.2% SDS at 42° C., followed by washing in 0.1×SSPE, and 0.1% SDS at 65° C. Another high stringency condition comprises hybridizing in conditions equivalent to hybridizing in 5×SSC containing 0.1% (w:v) SDS at 65° C. and washing in 0.1×SSC containing 0.1% SDS at 65° C. Other high stringency hybridization conditions, as well as moderately stringent conditions, are described in the references cited above.

[0108] “Codon optimized” refers to changes in the codons of the polynucleotide encoding a protein to those preferentially used in a particular organism such that the encoded protein is more efficiently expressed in that organism. Although the genetic code is degenerate, in that most amino acids are represented by several codons, called “synonyms” or “synonymous” codons, it is well known that codon usage by particular organisms is nonrandom and biased towards particular codon triplets. This codon usage bias may be higher in reference to a given gene, genes of common function or ancestral origin, highly expressed proteins versus low copy number proteins, and the aggregate protein coding regions of an organism's genome. In some embodiments, the polynucleotides encoding the RNA ligase enzymes are codon optimized for optimal production from the host organism selected for expression.

[0109] “Control sequence” refers herein to include all components that are necessary or advantageous for the expression of a polynucleotide and/or polypeptide of the present disclosure. Each control sequence may be native or foreign (e.g., heterologous) to the nucleic acid sequence encoding the polypeptide. Such control sequences include, but are not limited to, leaders, polyadenylation sequences, propeptide sequences, promoter sequences, signal peptide sequences, initiation sequences, and transcription terminators. In some embodiments, the control sequences include a promoter, and transcriptional and translational stop signals. In some embodiments, the control sequences are provided with linkers for the purpose of introducing specific restriction sites facilitating ligation of the control sequences with the coding region of the nucleic acid sequence encoding a polypeptide.

[0110] “Operably linked” or “operatively linked” refers to a configuration in which a control sequence is appropriately placed (i.e., in a functional relationship) at a position relative to a polynucleotide of interest such that the control sequence directs or regulates the expression of the polynucleotide of interest, and where appropriate, expression of the encoded polypeptide of interest.

[0111] “Promoter” or “promoter sequence” refers to a nucleic acid sequence that is recognized by a host cell for expression of a polynucleotide of interest, such as a coding sequence. The promoter sequence contains transcriptional control sequences that mediate the expression of a polynucleotide of interest. The promoter may be any nucleic acid sequence which shows transcriptional activity in the host cell of choice including mutant, truncated, and hybrid promoters, and may be obtained from genes encoding extracellular or intracellular polypeptides either homologous or heterologous to the host cell.

[0112] “Suitable reaction conditions” or “suitable conditions” refers to those conditions in the enzymatic conversion reaction solution (e.g., ranges of enzyme loading, substrate loading, temperature, pH, buffers, co-solvents, etc.) under which an RNA ligase polypeptide of the present disclosure is capable of converting a polynucleotide(s) substrate to the desired ligated product polynucleotide. Exemplary “suitable reaction conditions” are provided herein (see, the Examples).

[0113] “Product” in the context of an enzymatic conversion process refers to the compound or molecule resulting from the action of the RNA ligase polypeptide on the substrate.

[0114] “Culturing” refers to the growing of a population of cells under suitable conditions using any suitable medium (e.g., liquid, gel, or solid).

[0115] “Vector” is a recombinant construct for introducing a polynucleotide of interest into a cell. In some embodiments, the vector is an expression vector that is operably linked to a suitable control sequence capable of effecting the expression in a suitable host of the polynucleotide or a polypeptide encoded in the polynucleotide. In some embodiments, an “expression vector” has a promoter sequence operably linked to the polynucleotide (e.g., transgene) to drive expression in a host cell, and in some embodiments, also comprises a transcription terminator sequence.

[0116] “Expression” includes any step involved in the production of the polypeptide including, but not limited to, transcription, post-transcriptional modification, translation, and post-translational modification. In some embodiments, the term also encompasses secretion of the polypeptide from a cell.

[0117] “Produces” refers to the production of proteins and/or other compounds by cells. It is intended that the term encompass any step involved in the production of polypeptides including, but not limited to, transcription, post-transcriptional modification, translation, and post-translational modification. In some embodiments, the term also encompasses secretion of the polypeptide from a cell.

[0118] “Heterologous” or “recombinant” refers to the relationship between two or more nucleic acid or polypeptide sequences (e.g., a promoter sequence, signal peptide, terminator sequence, etc.) that are derived from different sources and are not associated in nature.

[0119] “Host cell” and “host strain” refer to suitable hosts for expression vectors comprising a polynucleotide provided herein (e.g., a polynucleotide sequences encoding at least one RNA ligase variant). In some embodiments, the host cells are prokaryotic or eukaryotic cells that have been transformed or transfected with vectors constructed using recombinant DNA techniques, and progeny thereof, as known in the art.

[0120] “Analogue” in the context of a polypeptide means a polypeptide more than 70% sequence identity but less than 100% sequence identity (e.g., more than 75%, 78%, 80%, 83%, 85%, 88%, 90%, 91%, 92%, 93%, 94%, 95%, 96%, 97%, 98%, 99% sequence identity) with a reference polypeptide. In some embodiments, analogues include non-naturally occurring amino acid residues including, but not limited, to homoarginine, ornithine and norvaline, as well as naturally occurring amino acids. In some embodiments, analogues also include one or more D-amino acid residues and non-peptide linkages between two or more amino acid residues.

### Engineered RNA Ligase Polypeptides

[0121] In one aspect, the present disclosure provides RNA ligases, including engineered RNA ligase polypeptide variants. In some embodiments, the RNA ligase and engineered RNA ligase polypeptide variants are useful for ligating polynucleotide substrates, such as for preparing polynucleotides from short oligonucleotides, and for diagnostic and other purposes. The engineered RNA ligase variants can be used in solution, as well as in immobilized embodiments. In some embodiments, the engineered RNA ligase can be prepared and used as non-fusion polypeptides or as fusion polypeptides.

[0122] In some embodiments, the engineered RNA ligase, or a functional fragment thereof, comprises an amino acid sequence having at least 80%, 81%, 82%, 83%, 84%, 85%, 86%, 87%, 88%, 89%, 90%, 91%, 92%, 93%, 94%, 95%, 96%, 97%, 98%, 99%, or more sequence identity to a reference sequence corresponding to residues 12 to 346 of an even-numbered SEQ ID NO. of SEQ ID NOs: 14 and 24-582, or to a reference sequence corresponding to an even-numbered SEQ ID NO. of SEQ ID NOs: 14 and 24-582, wherein the amino acid sequence comprises one or more substitutions relative to a reference sequence corresponding to residues 12 to 346 of SEQ ID NO: 14, 42, or 204, or relative to a reference sequence corresponding to SEQ ID NO: 14, 42, or 204.

[0123] In some embodiments, the engineered RNA ligase comprises an amino acid sequence having at least 80%, 81%, 82%, 83%, 84%, 85%, 86%, 87%, 88%, 89%, 90%, 91%, 92%, 93%, 94%, 95%, 96%, 97%, 98%, 99%, or more sequence identity to the reference sequence corresponding to residues 12 to 346 of SEQ ID NO: 14, 42, or 204, or to the reference sequence corresponding to SEQ ID NO: 14, 42, or 204, wherein the amino acid sequence comprises one or more substitutions relative to the reference sequence corresponding to residues 12 to 346 of SEQ ID NO: 14, 42, or 204, or relative to the reference sequence corresponding to SEQ ID NO: 14, 42, or 204.

[0124] In some embodiments, the engineered RNA ligase comprises an amino acid sequence having at least 80%, 81%, 82%, 83%, 84%, 85%, 86%, 87%, 88%, 89%, 90%, 91%, 92%, 93%, 94%, 95%, 96%, 97%, 98%, 99%, or more sequence identity to the reference sequence corresponding to residues 12 to 346 of SEQ ID NO: 14, or to the reference sequence corresponding to SEQ ID NO: 14, wherein the amino acid sequence comprises one or more substitutions relative to the reference sequence corresponding to residues 12 to 346 of SEQ ID NO: 14, or relative to the reference sequence corresponding to SEQ ID NO: 14.

[0125] In some embodiments, the engineered RNA ligase comprises an amino acid sequence having at least 80%, 81%, 82%, 83%, 84%, 85%, 86%, 87%, 88%, 89%, 90%, 91%, 92%, 93%, 94%, 95%, 96%, 97%, 98%, 99%, or more sequence identity to the reference sequence corresponding to residues 12 to 346 of SEQ ID NO: 42 or 204, or to the reference sequence corresponding to SEQ ID NO: 42 or 204, wherein the amino acid sequence comprises one or more substitutions relative to the reference sequence corresponding to residues 12 to 346 of SEQ ID NO: 14, or relative to the reference sequence corresponding to SEQ ID NO: 14.

[0126] In some embodiments, the engineered RNA ligase comprises an amino acid sequence having at least 80%, 81%, 82%, 83%, 84%, 85%, 86%, 87%, 88%, 89%, 90%, 91%, 92%, 93%, 94%, 95%, 96%, 97%, 98%, 99% or more sequence identity to the reference sequence corresponding to residues 12 to 346 of an even numbered SEQ ID NO. of SEQ ID NOs: 24-582, or to the reference sequence corresponding to an even numbered SEQ ID NO. of SEQ ID NOs: 24-582, wherein the amino acid sequence comprises one or more substitutions relative to the reference sequence corresponding to residues 12 to 346 of SEQ ID NO: 14, or relative to the reference sequence corresponding to SEQ ID NO: 14.

[0127] In some embodiments, the engineered RNA ligase comprises an amino acid sequence having at least 80%, 81%, 82%, 83%, 84%, 85%, 86%, 87%, 88%, 89%, 90%, 91%, 92%, 93%, 94%, 95%, 96%, 97%, 98%, 99%, or more sequence identity to the reference sequence corresponding to residues 12 to 346 of an even-numbered SEQ ID NO. of SEQ ID NOs: 24-128, or to the reference sequence corresponding to an even-numbered SEQ ID NO. of SEQ ID NOs: 24-128, wherein the amino acid sequence comprises one or more substitutions relative to the reference sequence corresponding to residues 12 to 346 of SEQ ID NO: 14, or relative to the reference sequence corresponding to SEQ ID NO: 14.

[0128] In some embodiments, the amino acid sequence of the engineered RNA ligase comprises at least a substitution at amino acid position 2, 14, 15, 18, 33, 39, 63, 69, 81, 83, 85, 86, 89, 95, 116, 117, 119, 138, 142, 144, 149, 154, 156, 159, 171, 175, 177, 181, 185, 186, 195, 202, 212, 214, 224, 226, 230, 247, 256, 257, 260, 266, 275, 280, 283, 285, 288, 291, 296, 303, 306, 307, 310, 314, 315, 316, 317, 326, 330, 331, 333, 334, 335, 337, 339, 342, or 345, or combinations thereof, wherein the amino acid positions are relative to the reference sequence corresponding to residues 12 to 346 of SEQ ID NO: 14, or relative to the reference sequence corresponding to SEQ ID NO: 14.

[0129] In some embodiments, the amino acid sequence of the engineered RNA ligase comprises at least a substitution 2G/V/E, 14K, 15L/E/M/P/Y, 18I, 33L, 39Q/S, 63V, 69D, 81Y, 85L, 86G, 89H/I/M/W, 95V, 116N, 117D, 119T, 138R, 142R, 144W, 149R/T, 154C, 156A/L/N/Q/T, 159F, 171E, 175K, 177P, 181D, 183V, 185G/K, 186D/R, 195G, 202Y, 212I, 214I, 224Y, 226I, 230D, 247K, 256A, 257L, 260S, 266L, 275N, 280G/N, 283I, 285K, 288E, 291P, 296K, 303Q, 306L, 307E/Q, 310K, 314W, 315S/T, 316L, 317A, 326R, 330M/R, 331R/W, 333V, 334R, 335D/H, 337L, 339P, 342I, or 345V, or combinations thereof, wherein the amino acid positions are relative to the reference sequence corresponding to residues 12 to 346 of SEQ ID NO: 14, or relative to the reference sequence corresponding to SEQ ID NO: 14.

[0130] In some embodiments, the amino acid sequence of the engineered RNA ligase comprises at least a substitution H2G/V/E, A14K, K15L/E/M/P/Y, S18I, G33L, H39Q/S, I63V, T69D, H81Y, M85L, K86G, K89H/I/M/W, M95V, G116N, G117D, Q119T, S138R, K142R, Y144W, V149R/T, A154C, G156A/L/N/Q/T, L159F, A171E, Q175K, V177P, K181D, I183V, N185G/K, Y186D/R, D195G, H202Y, T212I, V214I, N224Y, K226I, N230D, A247K, K256A, V257L, T260S, V266L, T275N, S280G/N, L283I, H285K, S288E, A291P, R296K, K303Q, I306L, N307E/Q, A310K, H314W, D315S/T, M316L, L317A, K326R, T330M/R, I331R/W, I333V, Q334R, N335D/H, I337L, S339P, H342I, or L345V, or combinations thereof, wherein the amino acid positions are relative to the reference sequence corresponding to residues 12 to 346 of SEQ ID NO: 14, or relative to the reference sequence corresponding to SEQ ID NO: 14.

[0131] In some embodiments, the amino acid sequence of the engineered RNA ligase comprises at least a substitution at amino acid position 95 or 177, or combination thereof, wherein the amino acid positions are relative to the reference sequence corresponding to residues 12 to 346 of SEQ ID NO: 14, or relative to the reference sequence corresponding to SEQ ID NO: 14.

[0132] In some embodiments, the amino acid sequence of the engineered RNA ligase comprises at least a substitution or amino acid residue 95V or 177P, or combination thereof, wherein the amino acid positions are relative to the reference sequence corresponding to residues 12 to 346 of SEQ ID NO: 14, or relative to the reference sequence corresponding to SEQ ID NO: 14.

[0133] In some embodiments, the amino acid sequence of the engineered RNA ligase comprises at least a substitution M95V or V177P, or combination thereof, wherein the amino acid positions are relative to the reference sequence corresponding to residues 12 to 346 of SEQ ID NO: 14, or relative to the reference sequence corresponding to SEQ ID NO: 14.

[0134] In some embodiments, the amino acid sequence of the engineered RNA ligase comprises at least a substitution at amino acid position 15, 149, 154, 156, 186, 195, 224, or 226, or combinations thereof, wherein the amino acid positions are relative to the reference sequence corresponding to residues 12 to 346 of SEQ ID NO: 14, or relative to the reference sequence corresponding to SEQ ID NO: 14.

[0135] In some embodiments, the amino acid sequence of the engineered RNA ligase comprises at least a substitution or amino acid residue 15Y, 149R, 154C, 156T, 186R, 195G, 224Y, or 226I, or combinations thereof, wherein the amino acid positions are relative to the reference sequence corresponding to residues 12 to 346 of SEQ ID NO: 14, or relative to the reference sequence corresponding to SEQ ID NO: 14.

[0136] In some embodiments, the amino acid sequence of the engineered RNA ligase comprises at least a substitution K15Y, V149R/T, A154C, G156A/L/N/Q/T, Y186D/R, D195G, N224Y, or K226I, or combinations thereof, wherein the amino acid positions are relative to the reference sequence corresponding to residues 12 to 346 of SEQ ID NO: 14, or relative to the reference sequence corresponding to SEQ ID NO: 14.

[0137] In some embodiments, the amino acid sequence of the engineered RNA ligase comprises at least a substitution at amino acid position 15, 95, 149, 154, 156, 177, 186, 195, 224, or 226, or combinations thereof, wherein the amino acid positions are relative to the reference sequence corresponding to residues 12 to 346 of SEQ ID NO: 14, or relative to the reference sequence corresponding to SEQ ID NO: 14.

[0138] In some embodiments, the amino acid sequence of the engineered RNA ligase comprises at least a substitution or amino acid residue 15L/E/M/P/Y, 95V, 149R/T, 154C, 156A/L/N/Q/T, 177P, 186D/R, 195G, 224Y, or 226I, or combinations thereof, wherein the amino acid positions are relative to the reference sequence corresponding to residues 12 to 346 of SEQ ID NO: 14, or relative to the reference sequence corresponding to SEQ ID NO: 14.

[0139] In some embodiments, the amino acid sequence of the engineered RNA ligase comprises at least a substitution or amino acid residue 15Y, 95V, 149R, 154C, 156T, 177P, 186R, 195G, 224Y, or 226I, or combinations thereof, wherein the amino acid positions are relative to the reference sequence corresponding to residues 12 to 346 of SEQ ID NO: 14, or relative to the reference sequence corresponding to SEQ ID NO: 14.

[0140] In some embodiments, the amino acid sequence of the engineered RNA ligase comprises at least a substitution K15Y, M95V, V149R, A154C, G156T, V177P, Y186R, D195G, N224Y, or K226I, or combinations thereof, wherein the amino acid positions are relative to the reference sequence corresponding to residues 12 to 346 of SEQ ID NO: 14, or relative to the reference sequence corresponding to SEQ ID NO: 14.

[0141] In some embodiments, the amino acid sequence of the engineered RNA ligase comprises at least a substitution or substitution set at amino acid position(s) 177/260/307/345, 171/175/183/280/283/303, 95/159/177/260/288, 175/183/247/280/283/296, 177/307, 81/171/183/335, 175/183, 81/175/183/280/296/335/339, 81/183/247/266, 95/177, 171/280/283/296/303, 85/177/260/288/333/345, 177/291/307/333, 81/171/175/183/316/337, 81/171/266/280/283/335/339, 177, 95/159/177/260/280/288/306/345, 171/175/335, 177/260/30/333, 14/95/177/288/307, 95/177/345, 95/159/177/260/285/288, 266/296, 81/283/335/337, 95/159/177/260/342/345, 63/171/175/183/266/280/296/316, 280/335/337, 81/171/280, 81/171/175/296/316, 171/175/316/335, 171/280/283/296/316, 171/283/335, 63/171/175/183/266/283/303/316, 171/247/266/283/296/303/316/335, 63/81/171/175/183/266/280/283/337, 81/171/303/316/335, 288/307, 14/95/159/177/345, 81/171/175/183/247/266/280/283, 81/247/266, 280, 85/177/260, 63/183, 175/183/247/280/283/316, 291, 247, 171/280/283, 81/171/175/280/316, 333, 171/296/316, 81/171, or 280/316/335, wherein the amino acid positions are relative to the reference sequence corresponding to residues 12 to 346 of SEQ ID NO: 14, or relative to the reference sequence corresponding to SEQ ID NO: 14.

[0142] In some embodiments, the amino acid sequence of the engineered RNA ligase comprises at least a substitution or substitution set 177P/260S/307E/345V, 171E/175K/183V/280N/283I/303Q, 95V/159F/177P/260S/288E, 175K/183V/247K/280N/283I/296K, 177P/307E, 81Y/171E/183V/335D, 175K/183V, 81Y/175K/183V/280N/296K/335D/339P, 81Y/183V/247K/266L, 95V/177P, 171E/280N/283I/296K/303Q, 85L/177P/260S/288E/333V/345V, 177P/291P/307E/333V, 81Y/171E/175K/183V/316L/337L, 81Y/171E/266L/280N/283I/335D/339P, 177P, 95V/159F/177P/260S/280N/288E/306L/345V, 171E/175K/335D, 177P/260S/306L/333V, 14K/95V/177P/288E/307E, 95V/177P/345V, 95V/159F/177P/260S/285K/288E, 266L/296K, 81Y/283I/335D/337L, 95V/159F/177P/260S/342I/345V, 63V/171E/175K/183V/266L/280N/296K/316L, 280N/335D/337L, 81Y/171E/280N, 81Y/171E/175K/296K/316L, 171E/175K/316L/335D, 171E/280N/283I/296K/316L, 171E/283I/335D, 63V/171E/175K/183V/266L/283I/303Q/316L, 171E/247K/266L/283I/296K/303Q/316L/335D, 63V/81Y/171E/175K/183V/266L/280N/283I/337L, 81Y/171E/303Q/316L/335D, 288E/307E, 14K/95V/159F/177P/345V, 81Y/171E/175K/183V/247K/266L/280N/283I, 81Y/247K/266L, 280N, 85L/177P/260S, 63V/183V, 175K/183V/247K/280N/283I/316L, 291P, 247K, 171E/280N/283I, 81Y/171E/175K/280N/316L, 333V, 171E/296K/316L, 81Y/171E, or 280N/316L/335D, wherein the amino acid positions are relative to the reference sequence corresponding to residues 12 to 346 of SEQ ID NO: 14, or relative to the reference sequence corresponding to SEQ ID NO: 14.

[0143] In some embodiments, the amino acid sequence of the engineered RNA ligase comprises at least a substitution or substitution set V177P/T260S/N307E/L345V, A171E/Q175K/I183V/S280N/L283I/K303Q, M95V/L159F/V177P/T260S/S288E, Q175K/I183V/A247K/S280N/L283I/R296K, V177P/N307E, H81Y/A171E/I183V/N335D, Q175K/I183V, H81Y/Q175K/I183V/S280N/R296K/N335D/S339P, H81Y/I183V/A247K/V266L, M95V/V177P, A171E/S280N/L283I/R296K/K303Q, M85L/V177P/T260S/S288E/I333V/L345V, V177P/A291P/N307E/I333V, H81Y/A171E/Q175K/I183V/M316L/I337L, H81Y/A171E/V266L/S280N/L283I/N335D/S339P, V177P, M95V/L159F/V177P/T260S/S280N/S288E/I306L/L345V, A171E/Q175K/N335D, V177P/T260S/I306L/I333V, A14K/M95V/V177P/S288E/N307E, M95V/V177P/L345V, M95V/L159F/V177P/T260S/H285K/S288E, V266L/R296K, H81Y/L283I/N335D/I337L, M95V/L159F/V177P/T260S/H342I/L345V, I63V/A171E/Q175K/I183V/V266L/S280N/R296K/M316L, S280N/N335D/I337L, H81Y/A171E/S280N, H81Y/A171E/Q175K/R296K/M316L, A171E/Q175K/M316L/N335D, A171E/S280N/L283I/R296K/M316L, A171E/L283I/N335D, I63V/A171E/Q175K/I183V/V266L/L283I/K303Q/M316L, A171E/A247K/V266L/L283I/R296K/K303Q/M316L/N335D, I63V/H81Y/A171E/Q175K/I183V/V266L/S280N/L283/1337L, H81Y/A171E/K303Q/M316L/N335D, S288E/N307E, A14K/M95V/L159F/V177P/L345V, H81Y/A171E/Q175K/I183V/A247K/V266L/S280N/L283I, H81Y/A247K/V266L, S280N, M85L/V177P/T260S, I63V/I183V, Q175K/I183V/A247K/S280N/L283I/M316L, A291P, A247K, A171E/S280N/L283I, H81Y/A171E/Q175K/S280N/M316L, I333V, A171E/R296K/M316L, H81Y/A171E, or S280N/M316L/N335D, wherein the amino acid positions are relative to the reference sequence corresponding to residues 12 to 346 of SEQ ID NO: 14, or relative to the reference sequence corresponding to SEQ ID NO: 14.

[0144] In some embodiments, the amino acid sequence of the engineered RNA ligase comprises at least a substitution set at amino acid positions 95/149/156/177/195, 15/95/149/177/186/224/317, 15/95/156/177/195/224/226/317/331, 15/95/177/195/317/331, 95/149/177/224/331, 15/95/177/195/224/226/317/331, 15/33/86/95/149/154/177/195/317, 15/86/95/154/156/177/186/195/224/226/331, 15/95/149/177/224/317/331, 15/95/154/156/177/186/317/331, 15/33/95/149/177/224/226/331, 15/95/177/186/224/226/317/331, 15/33/95/149/177/186/224/331, 95/177/195/224/331, 15/86/95/156/177/186/195/226/317/331, 15/95/177/195/226/331, 95/156/177/186/224/226/331, 15/95/149/154/156/177/224/226, 33/95/156/177/186/195/331, 15/86/95/149/154/156/177/317/331, 15/95/177/186/317/331, 15/86/95/149/154/177/195/331, 15/33/95/149/154/156/177/226, 15/95/149/154/177/186/317/331, 95/177/195/331, 15/86/95/156/177/186/195/331, 95/149/156/177/224/226/331, 15/95/149/154/156/177/186/317/331, 15/95/154/177/186/195, 15/86/95/177/195/224/226, 95/177/230, 15/33/95/156/177/331, 15/33/95/156/177/195/224/226, 33/95/149/156/177/317, 15/33/95/177/186/195, 95/177/334, 15/95/154/156/177/224/317, 15/95/149/177/186/331, 15/86/95/149/177/186/195/317, 15/33/95/154/177/195, 15/95/156/177/186/331, 15/95/149/177/186/317, 15/33/95/156/177/186/214/224/331, 15/86/95/177/186/224/226/317, 15/95/154/177/331, 15/95/149/154/177/226, 15/33/95/177/195/226, 15/95/177/224/317/331, 15/86/95/177/186/195/317, 95/177/226/317/331, 95/177/330, 89/95/177, 15/95/149/177/186, 95/156/177/195/331, 95/156/177, 15/86/95/156/177/186/331, 95/177/275, 15/33/95/177/186/224, 15/95/177/186/317, 15/33/95/177/186/226/317, 15/95/149/154/156/177/331, 15/95/154/177/226/317, 15/86/95/156/177/186/195/317, 95/177/257, 15/95/154/156/177/186, 33/95/177/186/224, 95/177/335, 15/86/95/156/177/186/195/224/331, 95/154/156/177/317, 39/95/177, 2/95/177, 15/95/177/224/226/331, 15/33/95/149/177/224, 89/95/177/307, 15/95/154/156/177/317, 15/95/177/186/331, 15/33/95/154/177/317, 15/33/95/177/195/224/317, 15/95/156/177/224/226, 95/154/177/186/331, 95/177/185, 15/18/95/149/177/186/195, 86/95/149/154/156/177, 15/33/95/149/177/331, 95/177/326, 95/177/202, 95/119/177, 95/177/212, 15/33/95/156/177/317, 95/177/280, 95/142/177, 15/95/149/177, 15/33/86/95/156/177/195, 95/177/315, 95/177/256, 15/33/95/156/177/186, 95/138/177, 95/117/177, 95/116/177, 95/177/316, 69/95/177, 95/177/310, 95/177/317, 15/95/177/195/331, 15/33/95/177/331, 95/177/314, or 95/144/177, wherein the amino acid positions are relative to the reference sequence corresponding to residues 12 to 346 of SEQ ID NO: 14, or relative to the reference sequence corresponding to SEQ ID NO: 14.

[0145] In some embodiments, the amino acid sequence of the engineered RNA ligase comprises at least a substitution set 95V/149R/156T/177P/195G, 15M/95V/149T/177P/186R/224Y/317A, 15P/95V/156T/177P/195G/224Y/226I/317A/331L, 15M/95V/177P/195G/317A/331R, 95V/149R/177P/224Y/331R, 15E/95V/177P/195G/224Y/226I/317A/331W, 15P/33L/86G/95V/149R/154C/177P/195G/317A, 15M/86G/95V/154C/156T/177P/186R/195G/224Y/226I/331L, 15P/95V/149R/177P/224Y/317A/331R, 15M/95V/154C/156T/177P/186R/317A/331R, 15M/33L/95V/149R/177P/224Y/226I/331W, 15E/95V/177P/186R/224Y/226I/317A/331R, 15Y/33L/95V/149R/177P/186R/224Y/331R, 95V/177P/195G/224Y/331R, 15P/86G/95V/156T/177P/186R/195G/226I/317A/331L, 15M/95V/177P/195G/226I/331W, 95V/156T/177P/186R/224Y/226I/331R, 15Y/95V/149R/154C/156T/177P/224Y/226I, 33L/95V/156T/177P/186R/195G/331L, 15P/86G/95V/149R/154C/156T/177P/317A/331R, 15M/95V/177P/186D/317A/331R, 15P/86G/95V/149R/154C/177P/195G/331L, 15Y/33L/95V/149T/154C/156T/177P/226I, 15P/95V/149R/154C/177P/186R/317A/331L, 95V/177P/195G/331R, 15M/86G/95V/156T/177P/186R/195G/331W, 95V/149R/156T/177P/224Y/226I/331W, 15P/95V/149R/154C/156T/177P/186R/317A/331L, 15Y/95V/154C/177P/186D/195G, 15E/86G/95V/177P/195G/224Y/226I, 95V/177P/230D, 15P/33L/95V/156T/177P/331R, 15L/33L/95V/156T/177P/195G/224Y/226I, 33L/95V/149R/156T/177P/317A, 15E/33L/95V/177P/186R/195G, 95V/177P/334R, 15E/95V/154C/156T/177P/224Y/317A, 15Y/95V/149R/177P/186R/331W, 15Y/86G/95V/149T/177P/186R/195G/317A, 15P/33L/95V/154C/177P/195G, 15P/95V/154C/156T/177P/186R/317A/331R, 15M/95V/156T/177P/186R/331R, 15Y/95V/149T/177P/186D/317A, 15E/33L/95V/156T/177P/186R/214I/224Y/331W, 15E/86G/95V/177P/186R/224Y/226I/317A, 15P/95V/154C/177P/331R, 15Y/95V/149T/154C/177P/226I, 15Y/33L/95V/177P/195G/226I, 15M/95V/177P/224Y/317A/331W, 15E/86G/95V/177P/186R/195G/317A, 95V/177P/226I/317A/331L, 95V/177P/330R, 89W/95V/177P, 15P/95V/149R/177P/186D/331L, 15P/95V/149R/177P/186R, 89M/95V/177P, 95V/156T/177P/195G/331L, 95V/156A/177P, 15E/86G/95V/156T/177P/186R/331R, 95V/177P/195G/331W, 95V/177P/275N, 15P/33L/95V/177P/186R/224Y, 15E/95V/177P/186R/317A, 15M/33L/95V/177P/186R/226I/317A, 89G/95V/177P, 15Y/95V/149R/154C/156T/177P/331W, 15Y/95V/154C/177P/226I/317A, 15Y/86G/95V/156T/177P/186R/195G/317A, 95V/177P/257L, 15Y/95V/154C/156T/177P/186D, 33L/95V/177P/186R/224Y, 95V/177P/335H, 15Y/86G/95V/156T/177P/186R/195G/224Y/331W, 95V/154C/156T/177P/317A, 39Q/95V/177P, 2G/95V/177P, 15M/95V/177P/224Y/226I/331R, 15M/33L/95V/149R/177P/224Y, 89I/95V/177P/307Q, 15M/95V/154C/156T/177P/317A, 15E/95V/177P/186R/331W, 15P/33L/95V/154C/177P/317A, 89H/95V/177P, 15Y/33L/95V/177P/195G/224Y/317A, 15E/95V/156T/177P/224Y/226I, 95V/154C/177P/186R/331L, 95V/177P/185G, 15M/18I/95V/149R/177P/186R/195G, 86G/95V/149R/154C/156T/177P, 15P/33L/95V/149R/177P/331L, 95V/177P/326R, 95V/177P/202Y, 95V/119T/177P, 95V/177P/212I, 2V/95V/177P, 15E/95V/149R/154C/156T/177P/331L, 15P/33L/95V/156T/177P/317A, 15Y/95V/154C/156T/177P/317A, 95V/156L/177P, 95V/177P/335D, 95V/156T/177P, 2E/95V/177P, 95V/177P/280G, 95V/142R/177P, 15E/95V/149R/177P, 95V/156Q/177P, 15E/33L/86G/95V/156T/177P/195G, 95V/177P/315T, 95V/177P/185K, 39S/95V/177P, 95V/177P/256A, 15Y/33L/95V/156T/177P/186D, 95V/138R/177P, 95V/117D/177P, 95V/116N/177P, 95V/177P/316L, 15M/95V/149R/177P, 69D/95V/177P, 95V/156N/177P, 95V/177P/310K, 95V/177P/317A, 15Y/95V/177P/195G/331L, 15M/33L/95V/177P/331L, 95V/177P/330M, 95V/177P/314W, 95V/144W/177P, 15Y/95V/149R/177P, or 95V/177P/315S, wherein the amino acid positions are relative to the reference sequence corresponding to residues 12 to 346 of SEQ ID NO: 14, or relative to the reference sequence corresponding to SEQ ID NO: 14.

[0146] In some embodiments, the amino acid sequence of the engineered RNA ligase comprises at least a substitution or substitution set provided in Table 6.1, wherein the amino acid positions are relative to the reference sequence corresponding to residues 12 to 346 of SEQ ID NO: 14, or relative to the reference sequence corresponding to SEQ ID NO: 14.

[0147] In some embodiments, the amino acid sequence of the engineered RNA ligase comprises at least a substitution set at amino acid positions 15/95/149/154/156/177/186/195/331, 95/149/154/177/186/195/224/317/331, 15/33/95/149/154/177/186/195, 95/149/156/177/186/195/224/226/317, 15/95/149/156/177/195/224/226, 15/33/86/95/149/154/156/177/186/195/226/331, 15/95/149/156/177/186/195/224/317/331, 15/33/95/149/154/177/195/317, 15/95/149/154/177/195/224/317, 15/95/149/156/177/186/224/226/317/331, 15/33/95/149/154/156/177/186/195/224/226/317/331, 95/149/177/195/224, 86/95/149/154/156/177/186/195/331, 15/33/95/149/156/177/195/224/317/331, 15/95/149/154/156/177/186/195/317/331, 15/33/95/149/154/156/177/186/224/331, 15/95/149/154/156/177/195/224, 15/95/149/154/156/177/195/224/226, 15/95/149/154/156/177/186/195/224/317, 33/95/149/156/177/186/224/331, 15/33/86/95/149/177/195/224/331, 15/86/95/149/154/156/177/186/195/331, 95/149/177/186/195/331, 15/95/154/156/177/186/226/331, 15/95/149/154/177/186/195/224/226, 15/95/149/154/156/177/195/224/331, 15/33/95/149/154/156/177/195/317/331, 15/33/95/154/156/177/186/195/224/317/331, 15/95/149/177/186/195/224/331, 15/33/95/149/154/156/177/195/224/331, 15/95/149/154/156/177/224/226/317/331, 15/33/95/149/156/177/195/331, 15/95/149/154/156/177/186/224/226/331, 95/154/156/177/195/224/226, 15/33/86/95/149/154/156/177/186/195/224/317/331, 15/95/149/154/156/177/186/195/224/226, 15/33/95/149/177/195/317/331, 15/95/149/154/177/224/331, 95/149/154/156/177/195/224/226/331, 15/95/149/154/177/195/331, 15/95/149/154/156/177/186/195, 15/33/95/149/154/156/177/186/195, 15/33/86/95/149/154/177/195/224/317/331, or 95/149/177/186/195/224/226/331, wherein the amino acid positions are relative to the reference sequence corresponding to residues 12 to 346 of SEQ ID NO: 14, or relative to the reference sequence corresponding to SEQ ID NO: 14.

[0148] In some embodiments, the amino acid sequence of the engineered RNA ligase comprises at least a substitution set 15M/95V/149R/154C/156T/177P/186R/195G/331R, 95V/149R/154C/177P/186D/195G/224Y/317A/331R, 15M/33L/95V/149T/154C/177P/186R/195G, 95V/149R/156T/177P/186R/195G/224Y/226I/317A, 15Y/95V/149R/156T/177P/195G/224Y/226I, 15Y/33L/86G/95V/149T/154C/156T/177P/186R/195G/226I/331W, 15Y/95V/149R/156T/177P/186R/195G/224Y/317A/331W, 15M/33L/95V/149T/154C/177P/195G/317A, 15M/95V/149R/154C/177P/195G/224Y/317A, 15Y/95V/149R/156T/177P/186D/224Y/226I/317A/331R, 15M/95V/149T/154C/156T/177P/186D/195G/331L, 15Y/33L/95V/149R/154C/156T/177P/186R/195G/224Y/226I/317A/331R, 95V/149R/177P/195G/224Y, 86G/95V/149T/154C/156T/177P/186R/195G/331L, 15P/33L/95V/149R/156T/177P/195G/224Y/317A/331L, 15P/95V/149T/154C/156T/177P/186D/195G/317A/331L, 15Y/33L/95V/149T/154C/156T/177P/186D/224Y/331L, 15P/95V/149R/156T/177P/186R/195G/224Y/317A/331W, 15Y/95V/149R/154C/156T/177P/195G/224Y, 15M/95V/149T/154C/156T/177P/195G/224Y/226I, 15E/95V/149R/154C/156T/177P/186R/195G/224Y/317A, 33L/95V/149T/156T/177P/186R/224Y/331L, 15Y/33L/86G/95V/149R/177P/195G/224Y/331W, 15E/86G/95V/149R/154C/156T/177P/186R/195G/331W, 95V/149R/177P/186R/195G/331W, 15E/95V/154C/156T/177P/186D/226I/331R, 15Y/95V/149T/154C/177P/186R/195G/224Y/226I, 15P/95V/149R/154C/156T/177P/195G/224Y/331W, 15E/33L/95V/149R/154C/156T/177P/195G/317A/331L, 15E/33L/95V/154C/156T/177P/186R/195G/224Y/317A/331L, 15P/95V/149R/177P/186D/195G/224Y/331L, 15P/33L/95V/149R/154C/156T/177P/195G/224Y/331W, 15P/95V/149T/154C/156T/177P/224Y/226I/317A/331W, 15P/33L/95V/149T/156T/177P/195G/331W, 15P/95V/149T/154C/156T/177P/186D/224Y/226I/331L, 95V/154C/156T/177P/195G/224Y/226I, 15Y/33L/86G/95V/149R/154C/156T/177P/186D/195G/224Y/317A/331W, 15Y/95V/149R/154C/156T/177P/186R/195G/224Y/226I, 15P/33L/95V/149R/177P/195G/317A/331L, 15E/95V/149T/154C/177P/224Y/331R, 95V/149T/154C/156T/177P/195G/224Y/226I/331R, 15M/95V/149R/154C/177P/195G/331L, 15Y/95V/149R/154C/156T/177P/186R/195G, 15E/95V/149T/154C/156T/177P/186R/195G/331R, 15M/33L/95V/149T/154C/156T/177P/186R/195G, 15P/33L/86G/95V/149R/154C/177P/195G/224Y/317A/331R, or 95V/149R/177P/186D/195G/224Y/226I/331R, wherein the amino acid positions are relative to the reference sequence corresponding to residues 12 to 346 of SEQ ID NO: 14, or relative to the reference sequence corresponding to SEQ ID NO: 14.

[0149] In some embodiments, the amino acid sequence of the engineered RNA ligase comprises at least a substitution or substitution set provided in Tables 7.1, 8.1, and 9.1, wherein the amino acid positions are relative to the reference sequence corresponding to residues 12 to 346 of SEQ ID NO: 14, or relative to the reference sequence corresponding to SEQ ID NO: 14.

[0150] In some embodiments, the amino acid sequence of the engineered RNA ligase comprises at least a substitution set at amino acid positions 2/15/39/69/95/144/149/154/156/177/186/195/224/226/316/330, 2/15/39/69/95/119/149/154/156/177/185/186/195/224/226/316, 15/69/95/149/154/156/177/186/195/212/224/226/256/330, 15/39/95/119/149/154/156/177/186/195/224/226/256/316/326/330, 15/69/95/116/119/149/154/156/177/185/186/195/224/226/330, 2/15/39/95/119/144/149/154/156/159/177/186/195/202/224/226/256/316/326/330, 15/81/95/149/154/156/177/183/185/186/195/224/226/230, 2/15/39/69/95/116/144/149/154/156/177/185/186/195/224/226, 2/14/15/39/69/95/116/119/149/154/156/159/177/185/186/195/224/226/256/326, 2/15/95/116/119/149/154/156/177/186/195/224/226/316, 15/95/116/119/144/149/154/156/177/185/186/195/224/226/314/316, 15/39/69/95/116/144/149/154/156/177/181/185/186/195/224/226/256/330, 2/15/39/69/95/119/144/149/154/156/177/185/186/195/224/226/314, 14/15/39/69/95/144/149/154/156/177/186/195/212/224/226/256/314/316/326/330, 15/39/69/95/144/149/154/156/177/185/186/195/224/226/316/330, 15/95/149/154/156/177/185/186/195/224/226/334/335, 15/39/63/95/149/154/156/177/186/195/224/226/230/257/275/330/335, 15/95/149/154/156/177/186/195/224/226/266/316/330/334/335, 15/39/63/95/149/154/156/177/183/185/186/195/224/226/230/330/334, 15/69/95/144/149/154/156/177/186/195/224/226/316, 15/95/116/119/149/154/156/177/186/195/202/212/224/226/326/330, 15/39/69/95/119/138/149/154/156/177/181/185/186/195/224/226/316/326, 15/39/81/95/149/154/156/177/186/195/224/226/230, 2/14/15/69/95/116/119/144/149/154/156/159/177/186/195/224/226/326/330, 15/39/95/149/154/156/177/186/195/224/226/334/345, 15/95/149/154/156/177/186/195/224/226/230/266/334, 2/15/95/116/144/149/154/156/159/177/186/195/224/226, 15/95/149/154/156/177/183/185/186/195/224/226/230, 2/14/15/95/116/149/154/156/177/186/195/224/226/316/326/330, 15/39/63/95/149/154/156/177/186/195/224/226/230/316/345, 15/69/95/138/144/149/154/156/159/177/185/186/195/202/224/226/316, 15/39/95/149/154/156/177/186/195/224/226/257/266/316/334, 15/95/149/154/156/177/186/195/224/226/257/275/334, 15/95/149/154/156/177/183/186/195/224/226, 15/89/95/149/154/156/177/185/186/195/224/226/230/316/345, 2/14/15/95/119/149/154/156/177/186/195/224/226, 15/95/144/149/154/156/177/186/195/224/226/316/330, 15/39/81/95/149/154/156/177/185/186/195/224/226/316/334, 15/89/95/149/154/156/177/186/195/224/226/230/266/345, 15/39/95/149/154/156/177/186/195/224/226/230/275/316, 15/39/95/149/154/156/177/186/195/224/226/230/266/334/335, 15/95/149/154/156/177/185/186/195/224/226/275/316/330, 15/95/119/149/154/156/177/186/195/202/224/226, 15/95/149/154/156/177/186/195/224/226/230/257/275/316/330/345, 15/95/149/154/156/177/186/195/224/226/230, 15/81/95/149/154/156/177/186/195/224/226/330/335/345, 15/95/149/154/156/177/183/186/195/224/226/230/266, 15/39/95/149/154/156/177/185/186/195/224/226, 15/39/81/95/149/154/156/177/183/186/195/224/226/275/316/334/345, 15/95/149/154/156/177/186/195/224/226/230/257/316, 15/39/95/116/149/154/156/177/186/195/224/226, or 15/95/149/154/156/177/183/185/186/195/224/226/257/275/316/330/334, wherein the amino acid positions are relative to the reference sequence corresponding to residues 12 to 346 of SEQ ID NO: 14, or relative to the reference sequence corresponding to SEQ ID NO: 14.

[0151] In some embodiments, the amino acid sequence of the engineered RNA ligase comprises at least a substitution set 2E/15Y/39S/69D/95V/144W/149R/154C/156L/177P/186R/195G/224Y/226I/316L/330M, 2V/15Y/39S/69D/95V/119T/149R/154C/156T/177P/185K/186R/195G/224Y/226I/316L, 15Y/69D/95V/149R/154C/156T/177P/186R/195G/212I/224Y/226I/256A/330M, 15Y/39S/95V/119T/149R/154C/156T/177P/186R/195G/224Y/226I/256A/316L/326R/330M, 15Y/69D/95V/116N/119T/149R/154C/156T/177P/185K/186R/195G/224Y/226I/330M, 2E/15Y/39S/95V/119T/144W/149R/154C/156N/159F/177P/186R/195G/202Y/224Y/226I/256A/316L/326R/330M, 15Y/81Y/95V/149R/154C/156T/177P/183V/185G/186R/195G/224Y/226I/230D, 2V/15Y/39S/69D/95V/116N/144W/149R/154C/156L/177P/185K/186R/195G/224Y/226I, 2E/14K/15Y/39S/69D/95V/116N/119T/149R/154C/156T/159F/177P/185K/186R/195G/224Y/226I/256A/326R, 2E/15Y/95V/116N/119T/149R/154C/156T/177P/186R/195G/224Y/226I/316L, 15Y/95V/116N/119T/144W/149R/154C/156T/177P/185K/186R/195G/224Y/226I/314W/316L, 15Y/39S/69D/95V/116N/144W/149R/154C/156T/177P/181D/185K/186R/195G/224Y/226I/256A/330M, 2E/15Y/39S/69D/95V/119T/144W/149R/154C/156L/177P/185K/186R/195G/224Y/226I/314W, 14K/15Y/39S/69D/95V/144W/149R/154C/156N/177P/186R/195G/212I/224Y/226I/256A/314W/316L/326R/330M, 15Y/39S/69D/95V/144W/149R/154C/156L/177P/185K/186R/195G/224Y/226I/316L/330M, 15Y/95V/149R/154C/156Q/177P/185G/186R/195G/224Y/226I/334R/335H, 15Y/39Q/63V/95V/149R/154C/156Q/177P/186R/195G/224Y/226I/230D/257L/275N/330R/335H, 15Y/95V/149R/154C/156Q/177P/186R/195G/224Y/226I/266L/316L/330R/334R/335H, 15Y/39Q/63V/95V/149R/154C/156Q/177P/183V/185G/186R/195G/224Y/226I/230D/330R/334R, 15Y/69D/95V/144W/149R/154C/156T/177P/186R/195G/224Y/226I/316L, 15Y/95V/116N/119T/149R/154C/156L/177P/186R/195G/202Y/212I/224Y/226I/326R/330M, 15Y/39S/69D/95V/119T/138R/149R/154C/156T/177P/181D/185K/186R/195G/224Y/226I/316L/326R, 15Y/39Q/81Y/95V/149R/154C/156Q/177P/186R/195G/224Y/226I/230D, 2V/14K/15Y/69D/95V/116N/119T/144W/149R/154C/156T/159F/177P/186R/195G/224Y/226I/326R/330M, 15Y/39Q/95V/149R/154C/156A/177P/186R/195G/224Y/226I/334R/345V, 15Y/95V/149R/154C/156T/177P/186R/195G/224Y/226I/230D/266L/334R, 2V/15Y/95V/116N/144W/149R/154C/156L/159F/177P/186R/195G/224Y/226I, 15Y/95V/149R/154C/156A/177P/183V/185G/186R/195G/224Y/226I/230D, 2E/14K/15Y/95V/116N/149R/154C/156T/177P/186R/195G/224Y/226I/316L/326R/330M, 15Y/39Q/63V/95V/149R/154C/156A/177P/186R/195G/224Y/226I/230D/316L/345V, 15Y/69D/95V/138R/144W/149R/154C/156T/159F/177P/185K/186R/195G/202Y/224Y/226I/316L, 15Y/39Q/95V/149R/154C/156Q/177P/186R/195G/224Y/226I/257L/266L/316L/334R, 15Y/95V/149R/154C/156Q/177P/186R/195G/224Y/226I/257L/275N/334R, 15Y/95V/149R/154C/156T/177P/183V/186R/195G/224Y/226I, 15Y/89W/95V/149R/154C/156A/177P/185G/186R/195G/224Y/226I/230D/316L/345V, 2E/14K/15Y/95V/119T/149R/154C/156T/177P/186R/195G/224Y/226I, 15Y/95V/144W/149R/154C/156L/177P/186R/195G/224Y/226I/316L/330M, 15Y/39Q/81Y/95V/149R/154C/156T/177P/185G/186R/195G/224Y/226I/316L/334R, 15Y/89H/95V/149R/154C/156T/177P/186R/195G/224Y/226I/230D/266L/345V, 15Y/39Q/95V/149R/154C/156Q/177P/186R/195G/224Y/226I/230D/275N/316L, 15Y/39Q/95V/149R/154C/156Q/177P/186R/195G/224Y/226I/230D/266L/334R/335H, 15Y/95V/149R/154C/156Q/177P/185G/186R/195G/224Y/226I/275N/316L/330R, 15Y/95V/119T/149R/154C/156N/177P/186R/195G/202Y/224Y/226I, 15Y/95V/149R/154C/156T/177P/186R/195G/224Y/226I/230D/257L/275N/316L/330R/345V, 15Y/95V/149R/154C/156T/177P/186R/195G/224Y/226I/230D, 15Y/81Y/95V/149R/154C/156Q/177P/186R/195G/224Y/226I/330R/335H/345V, 15Y/95V/149R/154C/156A/177P/183V/186R/195G/224Y/226I/230D/266L, 15Y/39S/95V/149R/154C/156T/177P/185K/186R/195G/224Y/226I, 15Y/39Q/81Y/95V/149R/154C/156T/177P/183V/186R/195G/224Y/226I/275N/316L/334R/345V, 15Y/95V/149R/154C/156A/177P/186R/195G/224Y/226I/230D/257L/316L, 15Y/39S/95V/116N/149R/154C/156N/177P/186R/195G/224Y/226I, or 15Y/95V/149R/154C/156T/177P/183V/185G/186R/195G/224Y/226I/257L/275N/316L/330R/334R, wherein the amino acid positions are relative to the reference sequence corresponding to residues 12 to 346 of SEQ ID NO: 14, or relative to the reference sequence corresponding to SEQ ID NO: 14.

[0152] In some embodiments, the amino acid sequence of the engineered RNA ligase comprises at least a substitution or substitution set provided in Table 10.1, 11.1, and 12.1, wherein the amino acid positions are relative to the reference sequence corresponding to residues 12 to 346 of SEQ ID NO: 14, or relative to the reference sequence corresponding to SEQ ID NO: 14.

[0153] In some embodiments, the amino acid sequence of the engineered RNA ligase comprises at least a substitution at an amino acid position provided in Tables 5.1, 6.1, 7.1, 8.1, 9.1, 10.1, 11.1, and 12.1, wherein the amino acid positions are relative to the reference sequence corresponding to residues 12 to 346 of SEQ ID NO: 14, or relative to the reference sequence corresponding to SEQ ID NO: 14.

[0154] In some embodiments, the amino acid sequence of the engineered RNA ligase comprises at least one substitution set forth in Tables 5.1, 6.1, 7.1, 8.1, 9.1, 10.1, 11.1, and 12.1, wherein the amino acid positions are relative to the reference sequence corresponding to residues 12 to 346 of SEQ ID NO: 14, or relative to the reference sequence corresponding to SEQ ID NO: 14.

[0155] In some embodiments, the amino acid sequence of the engineered RNA ligase comprises at least a substitution or substitution set at the amino acid position(s) set forth in Tables 5.1, 6.1, 7.1, 8.1, 9.1, 10.1, 11.1, and 12.1, wherein the amino acid positions are relative to the reference sequence corresponding to residues 12 to 346 of SEQ ID NO: 14, or relative to the reference sequence corresponding to SEQ ID NO: 14.

[0156] In some embodiments, the amino acid sequence of the engineered RNA ligase comprises at least a substitution or substitution set of an RNA ligase variant set forth in Tables 5.1, 6.1, 7.1, 8.1, 9.1, 10.1, 11.1, and 12.1, wherein the amino acid positions are relative to the reference sequence corresponding to residues 12 to 346 of SEQ ID NO: 14, or relative to the reference sequence corresponding to SEQ ID NO: 14.

[0157] In some embodiments, the engineered RNA ligase comprises an amino acid sequence having at least 80%, 81%, 82%, 83%, 84%, 85%, 86%, 87%, 88%, 89%, 90%, 91%, 92%, 93%, 94%, 95%, 96%, 97%, 98%, 99%, or more sequence identity to the reference sequence corresponding to residues 12 to 346 of SEQ ID NO: 42 or 204, or to the reference sequence corresponding to SEQ ID NO: 42 or 204.

[0158] In some embodiments, the engineered RNA ligase comprises an amino acid sequence having at least 80%, 81%, 82%, 83%, 84%, 85%, 86%, 87%, 88%, 89%, 90%, 91%, 92%, 93%, 94%, 95%, 96%, 97%, 98%, 99%, or more sequence identity to the reference sequence corresponding to residues 12 to 346 of an even-numbered SEQ ID NO. of SEQ ID NOs: 24-582, or to the reference sequence corresponding to an even-numbered SEQ ID NO. of SEQ ID NOs: 24-582.

[0159] In some embodiments, the engineered RNA ligase comprises an amino acid sequence having at least 80%, 81%, 82%, 83%, 84%, 85%, 86%, 87%, 88%, 89%, 90%, 91%, 92%, 93%, 94%, 95%, 96%, 97%, 98%, 99%, or more sequence identity to the reference sequence corresponding to residues 12 to 346 of SEQ ID NO: 42 or 204, or to the reference sequence corresponding to SEQ ID NO: 42 or 204, wherein the amino acid sequence comprises one or more substitutions relative to the reference sequence corresponding to residues 12 to 346 of SEQ ID NO: 42 or 204, or relative to the reference sequence corresponding to SEQ ID NO: 42 or 204.

[0160] In some embodiments, the engineered RNA ligase comprises an amino acid sequence having at least 80%, 81%, 82%, 83%, 84%, 85%, 86%, 87%, 88%, 89%, 90%, 91%, 92%, 93%, 94%, 95%, 96%, 97%, 98%, 99% or more sequence identity to the reference sequence corresponding to residues 12 to 346 of an even numbered SEQ ID NO. of SEQ ID NOs: 24-582, or to the reference sequence corresponding to an even numbered SEQ ID NO. of SEQ ID NOs: 24-582, wherein the amino acid sequence comprises one or more substitutions relative to the reference sequence corresponding to residues 12 to 346 of SEQ ID NO: 42 or 204, or relative to the reference sequence corresponding to SEQ ID NO: 42 or 204.

[0161] In some embodiments, the amino acid sequence of the engineered RNA ligase comprises at least a substitution at amino acid position 2, 14, 15, 18, 33, 39, 63, 69, 81, 83, 85, 86, 89, 95, 116, 117, 119, 138, 142, 144, 149, 154, 156, 159, 171, 175, 177, 181, 185, 186, 195, 202, 212, 214, 224, 226, 230, 247, 256, 257, 260, 266, 275, 280, 283, 285, 288, 291, 296, 303, 306, 307, 310, 314, 315, 316, 317, 326, 330, 331, 333, 334, 335, 337, 339, 342, or 345, or combinations thereof, wherein the amino acid positions are relative to the reference sequence corresponding to residues 12 to 346 of SEQ ID NO: 42 or 204, or relative to the reference sequence corresponding to SEQ ID NO: 42 or 204.

[0162] In some embodiments, the amino acid sequence of the engineered RNA ligase comprises at least a substitution or an amino acid residue 2G/V/E, 14K, 15E/L/M/P/Y, 18I, 33L, 39Q/S, 63V, 69D, 81Y, 85L, 86G, 89H/I/M/W, 95V, 116N, 117D, 119T, 138R, 142R, 144W, 149R/T, 154C, 156A/L/N/Q/T, 159F, 171E, 175K, 177P, 181D, 183V, 185G/K, 186D/R, 195G, 202Y, 212I, 214I, 224Y, 226I, 230D, 247K, 256A, 257L, 260S, 266L, 275N, 280G/N, 283I, 285K, 288E, 291P, 296K, 303Q, 306L, 307E/Q, 310K, 314W, 315S/T, 316L, 317A, 326R, 330M/R, 331R/W, 333V, 334R, 335D/H, 337L, 339P, 342I, or 345V, or combinations thereof, wherein the amino acid positions are relative to the reference sequence corresponding to residues 12 to 346 of SEQ ID NO: 42 or 204, or relative to the reference sequence corresponding to SEQ ID NO: 42 or 204.

[0163] In some embodiments, the amino acid sequence of the engineered RNA ligase comprises at least a substitution at amino acid position 95 or 177, or combination thereof, wherein the amino acid positions are relative to the reference sequence corresponding to residues 12 to 346 of SEQ ID NO: 42 or 204, or relative to the reference sequence corresponding to SEQ ID NO: 42 or 204.

[0164] In some embodiments, the amino acid sequence of the engineered RNA ligase comprises at least an amino acid residue 95V or 177P, or combination thereof, wherein the amino acid positions are relative to the reference sequence corresponding to residues 12 to 346 of SEQ ID NO: 42 or 204, or relative to the reference sequence corresponding to SEQ ID NO: 42 or 204.

[0165] In some embodiments, the amino acid sequence of the engineered RNA ligase comprises at least a substitution at amino acid position 15, 95, 149, 154, 156, 177, 186, 195, 224, or 226, or combinations thereof, wherein the amino acid positions are relative to the reference sequence corresponding to residues 12 to 346 of SEQ ID NO: 42 or 204, or relative to the reference sequence corresponding to SEQ ID NO: 42 or 204.

[0166] In some embodiments, the amino acid sequence of the engineered RNA ligase comprises at least a substitution or an amino acid residue 15Y, 95V, 149R, 154C, 156T, 177P, 186R, 195G, 224Y, or 226I, or combinations thereof, wherein the amino acid positions are relative to the reference sequence corresponding to residues 12 to 346 of SEQ ID NO: 42 or 204, or relative to the reference sequence corresponding to SEQ ID NO: 42 or 204.

[0167] In some embodiments, the engineered RNA ligase comprises an amino acid sequence having at least 80%, 81%, 82%, 83%, 84%, 85%, 86%, 87%, 88%, 89%, 90%, 91%, 92%, 93%, 94%, 95%, 96%, 97%, 98%, 99%, or more sequence identity to the reference sequence corresponding to residues 12 to 346 of SEQ ID NO: 42, or to the reference sequence corresponding to SEQ ID NO: 42, wherein the amino acid sequence comprises one or more substitutions relative to the reference sequence corresponding to residues 12 to 346 of SEQ ID NO: 42, or relative to the reference sequence corresponding to SEQ ID NO: 42.

[0168] In some embodiments, the engineered RNA ligase comprises an amino acid sequence having at least 80%, 81%, 82%, 83%, 84%, 85%, 86%, 87%, 88%, 89%, 90%, 91%, 92%, 93%, 94%, 95%, 96%, 97%, 98%, 99%, or more sequence identity to the reference sequence corresponding to residues 12 to 346 of an even-numbered SEQ ID NO. of SEQ ID NOs: 130-478, or to the reference sequence corresponding to an even-numbered SEQ ID NO. of SEQ ID NOs: 130-478, wherein the amino acid sequence comprises one or more substitutions relative to the reference sequence corresponding to residues 12 to 346 of SEQ ID NO: 42, or relative to the reference sequence corresponding to SEQ ID NO: 42.

[0169] In some embodiments, the amino acid sequence of the engineered RNA ligases comprises a substitution or substitution set at amino acid positions(s) 149/156/195, 15/149/186/224/317, 15/156/195/224/226/317/331, 15/195/317/331, 149/224/331, 15/195/224/226/317/331, 15/33/86/149/154/195/317, 15/86/154/156/186/195/224/226/331, 15/149/224/317/331, 15/154/156/186/317/331, 15/33/149/224/226/331, 15/186/224/226/317/331, 15/33/149/186/224/331, 195/224/331, 15/86/156/186/195/226/317/331, 15/195/22/331, 156/186/224/226/331, 15/149/154/156/224/226, 33/156/186/195/331, 15/86/149/154/156/317/331, 15/186/317/331, 15/86/149/154/195/331, 15/33/149/154/156/226, 15/149/154/186/317/331, 195/331, 15/86/156/186/195/331, 149/156/224/226/331, 15/149/154/156/186/317/331, 15/154/186/195, 15/86/195/224/226, 230, 15/33/156/331, 15/33/156/195/224/226, 33/149/156/317, 15/33/186/195, 334, 15/154/156/224/317, 15/149/186/331, 15/86/149/186/195/317, 15/33/154/195, 15/156/186/331, 15/149/186/317, 15/33/156/186/214/224/331, 15/86/186/224/226/317, 15/154/331, 15/149/154/226, 15/33/195/226, 15/224/317/331, 15/86/186/195/317, 226/317/331, 330, 89, 15/149/186, 156/195/331, 156, 15/86/156/186/331, 275, 15/33/186/224, 15/186/317, 15/33/186/226/317, 15/149/154/156/331, 15/154/226/317, 15/86/156/186/195/317, 257, 15/154/156/186, 33/186/224, 335, 15/86/156/186/195/224/331, 154/156/317, 39, 2, 15/224/226/331, 15/33/149/224, 89/307, 15/154/156/317, 15/186/331, 15/33/154/317, 15/33/195/224/317, 15/156/224/226, 154/186/331, 185, 15/18/149/186/195, 86/149/154/156, 15/33/149/331, 326, 202, 119, 212, 15/33/156/317, 280, 142, 15/149, 15/33/86/156/195, 315, 256, 15/33/156/186, 138, 117, 116, 316, 69, 310, 317, 15/195/331, 15/33/331, 314, or 144, wherein the amino acid positions are relative to the reference sequence corresponding to residues 12 to 346 of SEQ ID NO: 42, or relative to the reference sequence corresponding to SEQ ID NO: 42.

[0170] In some embodiments, the amino acid sequence of the engineered RNA ligases comprises a substitution or substitution set 149R/156T/195G, 15M/149T/186R/224Y/317A, 15P/156T/195G/224Y/226I/317A/331L, 15M/195G/317A/331R, 149R/224Y/331R, 15E/195G/224Y/226I/317A/331W, 15P/33L/86G/149R/154C/195G/317A, 15M/86G/154C/156T/186R/195G/224Y/226I/331L, 15P/149R/224Y/317A/331R, 15M/154C/156T/186R/317A/331R, 15M/33L/149R/224Y/226I/331W, 15E/186R/224Y/226I/317A/331R, 15Y/33L/149R/186R/224Y/331R, 195G/224Y/331R, 15P/86G/156T/186R/195G/226I/317A/331L, 15M/195G/226/331W, 156T/186R/224Y/226I/331R, 15Y/149R/154C/156T/224Y/226I, 33L/156T/186R/195G/331L, 15P/86G/149R/154C/156T/317A/331R, 15M/186D/317A/331R, 15P/86G/149R/154C/195G/331L, 15Y/33L/149T/154C/156T/226I, 15P/149R/154C/186R/317A/331L, 195G/331R, 15M/86G/156T/186R/195G/331W, 149R/156T/224Y/226I/331W, 15P/149R/154C/156T/186R/317A/331L, 15Y/154C/186D/195G, 15E/86G/195G/224Y/226I, 230D, 15P/33L/156T/331R, 15L/33L/156T/195G/224Y/226I, 33L/149R/156T/317A, 15E/33L/186R/195G, 334R, 15E/154C/156T/224Y/317A, 15Y/149R/186R/331W, 15Y/86G/149T/186R/195G/317A, 15P/33L/154C/195G, 15P/154C/156T/186R/317A/331R, 15M/156T/186R/331R, 15Y/149T/186D/317A, 15E/33L/156T/186R/214I/224Y/331W, 15E/86G/186R/224Y/226I/317A, 15P/154C/331R, 15Y/149T/154C/226I, 15Y/33L/195G/226I, 15M/224Y/317A/331W, 15E/86G/186R/195G/317A, 226I/317A/331L, 330R, 89W, 15P/149R/186D/331L, 15P/149R/186R, 89M, 156T/195G/331L, 156A, 15E/86G/156T/186R/331R, 195G/331W, 275N, 15P/33L/186R/224Y, 15E/186R/317A, 15M/33L/186R/226I/317A, 89G, 15Y/149R/154C/156T/331W, 15Y/154C/226I/317A, 15Y/86G/156T/186R/195G/317A, 257L, 15Y/154C/156T/186D, 33L/186R/224Y, 335H, 15Y/86G/156T/186R/195G/224Y/331W, 154C/156T/317A, 39Q, 2G, 15M/224Y/226I/331R, 15M/33L/149R/224Y, 89I/307Q, 15M/154C/156T/317A, 15E/186R/331W, 15P/33L/154C/317A, 89H, 15Y/33L/195G/224Y/317A, 15E/156T/224Y/226I, 154C/186R/331L, 185G, 15M/18I/149R/186R/195G, 86G/149R/154C/156T, 15P/33L/149R/331L, 326R, 202Y, 119T, 212I, 2V, 15E/149R/154C/156T/331L, 15P/33L/156T/317A, 15Y/154C/156T/317A, 156L, 335D, 156T, 2E, 280G, 142R, 15E/149R, 156Q, 15E/33L/86G/156T/195G, 315T, 185K, 39S, 256A, 15Y/33L/156T/186D, 138R, 117D, 116N, 316L, 15M/149R, 69D, 156N, 310K, 317A, 15Y/195G/331L, 15M/33L/331L, 330M, 314W, 144W, 15Y/149R, or 315S, wherein the amino acid positions are relative to the reference sequence corresponding to residues 12 to 346 of SEQ ID NO: 42, or relative to the reference sequence corresponding to SEQ ID NO: 42.

[0171] In some embodiments, the amino acid sequence of the engineered RNA ligase comprises at least a substitution or substitution set V149R/G156T/D195G, K15M/V149T/Y186R/N224Y/L317A, K15P/G156T/D195G/N224Y/K226I/L317A/I331L, K15M/D195G/L317A/I331R, V149R/N224Y/I331R, K15E/D195G/N224Y/K226I/L317A/I331W, K15P/G33L/K86G/V149R/A154C/D195G/L317A, K15M/K86G/A154C/G156T/Y186R/D195G/N224Y/K226I/I331L, K15P/V149R/N224Y/L317A/I331R, K15M/A154C/G156T/Y186R/L317A/I331R, K15M/G33L/V149R/N224Y/K226I/I331W, K15E/Y186R/N224Y/K226I/L317A/I331R, K15Y/G33L/V149R/Y186R/N224Y/I331R, D195G/N224Y/I331R, K15P/K86G/G156T/Y186R/D195G/K226I/L317A/I331L, K15M/D195G/K226I/I331W, G156T/Y186R/N224Y/K226I/I331R, K15Y/V149R/A154C/G156T/N224Y/K226I, G33L/G156T/Y186R/D195G/I331L, K15P/K86G/V149R/A154C/G156T/L317A/I331R, K15M/Y186D/L317A/I331R, K15P/K86G/V149R/A154C/D195G/I331L, K15Y/G33L/V149T/A154C/G156T/K226I, K15P/V149R/A154C/Y186R/L317A/I331L, D195G/I331R, K15M/K86G/G156T/Y186R/D195G/I331W, V149R/G156T/N224Y/K226I/I331W, K15P/V149R/A154C/G156T/Y186R/L317A/I331L, K15Y/A154C/Y186D/D195G, K15E/K86G/D195G/N224Y/K226I, N230D, K15P/G33L/G156T/I331R, K15L/G33L/G156T/D195G/N224Y/K226I, G33L/V149R/G156T/L317A, K15E/G33L/Y186R/D195G, Q334R, K15E/A154C/G156T/N224Y/L317A, K15Y/V149R/Y186R/I331W, K15Y/K86G/V149T/Y186R/D195G/L317A, K15P/G33L/A154C/D195G, K15P/A154C/G156T/Y186R/L317A/I331R, K15M/G156T/Y186R/I331R, K15Y/V149T/Y186D/L317A, K15E/G33L/G156T/Y186R/V214I/N224Y/I331W, K15E/K86G/Y186R/N224Y/K226I/L317A, K15P/A154C/I331R, K15Y/V149T/A154C/K226I, K15Y/G33L/D195G/K226I, K15M/N224Y/L317A/I331W, K15E/K86G/Y186R/D195G/L317A, K226I/L317A/I331L, T330R, K89W, K15P/V149R/Y186D/I331L, K15P/V149R/Y186R, K89M, G156T/D195G/I331L, G156A, K15E/K86G/G156T/Y186R/I331R, D195G/I331W, T275N, K15P/G33L/Y186R/N224Y, K15E/Y186R/L317A, K15M/G33L/Y186R/K226I/L317A, K89G, K15Y/V149R/A154C/G156T/I331W, K15Y/A154C/K226I/L317A, K15Y/K86G/G156T/Y186R/D195G/L317A, V257L, K15Y/A154C/G156T/Y186D, G33L/Y186R/N224Y, N335H, K15Y/K86G/G156T/Y186R/D195G/N224Y/I331W, A154C/G156T/L317A, H39Q, H2G, K15M/N224Y/K226I/I331R, K15M/G33L/V149R/N224Y, K89I/N307Q, K15M/A154C/G156T/L317A, K15E/Y186R/I331W, K15P/G33L/A154C/L317A, K89H, K15Y/G33L/D195G/N224Y/L317A, K15E/G156T/N224Y/K226I, A154C/Y186R/I331L, N185G, K15M/S18I/V149R/Y186R/D195G, K86G/V149R/A154C/G156T, K15P/G33L/V149R/I331L, K326R, H202Y, Q119T, T212I, H2V, K15E/V149R/A154C/G156T/I331L, K15P/G33L/G156T/L317A, K15Y/A154C/G156T/L317A, G156L, N335D, G156T, H2E, S280G, K142R, K15E/V149R, G156Q, K15E/G33L/K86G/G156T/D195G, D315T, N185K, H39S, K256A, K15Y/G33L/G156T/Y186D, S138R, G117D, G116N, M316L, K15M/V149R, T690, G156N, A310K, L317A, K15Y/D195G/I331L, K15M/G33L/I331L, T330M, H314W, Y144W, K15Y/V149R, or D315S, wherein the amino acid positions are relative to the reference sequence corresponding to residues 12 to 346 of SEQ ID NO: 42, or relative to the reference sequence corresponding to SEQ ID NO: 42.

[0172] In some embodiments, the amino acid sequence of the engineered RNA ligases comprises at least a substitution set at amino acid positions 15/149/154/156/186/195/331, 149/154/186/195/224/317/331, 15/33/149/154/186/195, 149/156/186/195/224/226/317, 15/149/156/195/224/226, 15/33/86/149/154/156/186/195/226/331, 15/149/156/186/195/224/317/331, 15/33/149/154/195/317, 15/149/154/195/224/317, 15/149/156/186/224/226/317/331, 15/33/149/154/156/186/195/224/226/317/331, 149/195/224, 86/149/154/156/186/195/331, 15/33/149/156/195/224/317/331, 15/149/154/156/186/195/317/331, 15/33/149/154/156/186/224/331, 15/149/154/156/195/224, 15/149/154/156/195/224/226, 15/149/154/156/186/195/224/317, 33/149/156/186/224/331, 15/33/86/149/195/224/331, 15/86/149/154/156/186/195/331, 149/186/195/331, 15/154/156/186/226/331, 15/149/154/186/195/224/226, 15/149/154/156/195/224/331, 15/33/149/154/156/195/317/331, 15/33/154/156/186/195/224/317/331, 15/149/186/195/224/331, 15/33/149/154/156/195/224/331, 15/149/154/156/224/226/317/331, 15/33/149/156/195/331, 15/149/154/156/186/224/226/331, 154/156/195/224/226, 15/33/86/149/154/156/186/195/224/317/331, 15/149/154/156/186/195/224/226, 15/33/149/195/317/331, 15/149/154/224/331, 149/154/156/195/224/226/331, 15/149/154/195/331, 15/149/154/156/186/195, 15/33/149/154/156/186/195, 15/33/86/149/154/195/224/317/331, or 149/186/195/224/226/331, wherein the amino acid positions are relative to the reference sequence corresponding to residues 12 to 346 of SEQ ID NO: 42, or relative to the reference sequence corresponding to SEQ ID NO: 42.

[0173] In some embodiments, the amino acid sequence of the engineered RNA ligases comprises at least a substitution set 15M/149R/154C/156T/186R/195G/331R, 149R/154C/186D/195G/224Y/317A/331R, 15M/33L/149T/154C/186R/195G, 149R/156T/186R/195G/224Y/226I/317A, 15Y/149R/156T/195G/224Y/226I, 15Y/33L/86G/149T/154C/156T/186R/195G/226I/331W, 15Y/149R/156T/186R/195G/224Y/317A/331W, 15M/33L/149T/154C/195G/317A, 15M/149R/154C/195G/224Y/317A, 15Y/149R/156T/186D/224Y/226I/317A/331R, 15M/149T/154C/156T/186D/195G/331L, 15Y/33L/149R/154C/156T/186R/195G/224Y/226I/317A/331R, 149R/195G/224Y, 86G/149T/154C/156T/186R/195G/331L, 15P/33L/149R/156T/195G/224Y/317A/331L, 15P/149T/154C/156T/186D/195G/317A/331L, 15Y/33L/149T/154C/156T/186D/224Y/331L, 15P/149R/156T/186R/195G/224Y/317A/331W, 15Y/149R/154C/156T/195G/224Y, 15M/149T/154C/156T/195G/224Y/226I, 15E/149R/154C/156T/186R/195G/224Y/317A, 33L/149T/156T/186R/224Y/331L, 15Y/33L/86G/149R/195G/224Y/331W, 15E/86G/149R/154C/156T/186R/195G/331W, 149R/186R/195G/331W, 15E/154C/156T/186D/226I/331R, 15Y/149T/154C/186R/195G/224Y/226I, 15P/149R/154C/156T/195G/224Y/331W, 15E/33L/149R/154C/156T/195G/317A/331L, 15E/33L/154C/156T/186R/195G/224Y/317A/331L, 15P/149R/186D/195G/224Y/331L, 15P/33L/149R/154C/156T/195G/224Y/331W, 15P/149T/154C/156T/224Y/226I/317A/331W, 15P/33L/149T/156T/195G/331W, 15P/149T/154C/156T/186D/224Y/226I/331L, 154C/156T/195G/224Y/226I, 15Y/33L/86G/149R/154C/156T/186D/195G/224Y/317A/331W, 15Y/149R/154C/156T/186R/195G/224Y/226I, 15P/33L/149R/195G/317A/331L, 15E/149T/154C/224Y/331R, 149T/154C/156T/195G/224Y/226I/331R, 15M/149R/154C/195G/331L, 15Y/149R/154C/156T/186R/195G, 15E/149T/154C/156T/186R/195G/331R, 15M/33L/149T/154C/156T/186R/195G, 15P/33L/86G/149R/154C/195G/224Y/317A/331R, or 149R/186D/195G/224Y/226I/331R, wherein the amino acid positions are relative to the reference sequence corresponding to residues 12 to 346 of SEQ ID NO: 42, or relative to the reference sequence corresponding to SEQ ID NO: 42.

[0174] In some embodiments, the amino acid sequence of the engineered RNA ligase comprises at least a substitution set K15M/V149R/A154C/G156T/Y186R/D195G/I331R, V149R/A154C/Y186D/D195G/N224Y/L317A/I331R, K15M/G33L/V149T/A154C/Y186R/D195G, V149R/G156T/Y186R/D195G/N224Y/K226I/L317A, K15Y/V149R/G156T/D195G/N224Y/K226I, K15Y/G33L/K86G/V149T/A154C/G156T/Y186R/D195G/K226I/I331W, K15Y/V149R/G156T/Y186R/D195G/N224Y/L317A/I331W, K15M/G33L/V149T/A154C/D195G/L317A, K15M/V149R/A154C/D195G/N224Y/L317A, K15Y/V149R/G156T/Y186D/N224Y/K226I/L317A/I331R, K15M/V149T/A154C/G156T/Y186D/D195G/I331L, K15Y/G33L/V149R/A154C/G156T/Y186R/D195G/N224Y/K226I/L317A/I331R, V149R/D195G/N224Y, K86G/V149T/A154C/G156T/Y186R/D195G/I331L, K15P/G33L/V149R/G156T/D195G/N224Y/L317A/I331L, K15P/V149T/A154C/G156T/Y186D/D195G/L317A/I331L, K15Y/G33L/V149T/A154C/G156T/Y186D/N224Y/I331L, K15P/V149R/G156T/Y186R/D195G/N224Y/L317A/I331W, K15Y/V149R/A154C/G156T/D195G/N224Y, K15M/V149T/A154C/G156T/D195G/N224Y/K226I, K15E/V149R/A154C/G156T/Y186R/D195G/N224Y/L317A, G33L/V149T/G156T/Y186R/N224Y/I331L, K15Y/G33L/K86G/V149R/D195G/N224Y/I331W, K15E/K86G/V149R/A154C/G156T/Y186R/D195G/I331W, V149R/Y186R/D195G/I331W, K15E/A154C/G156T/Y186D/K226I/I331R, K15Y/V149T/A154C/Y186R/D195G/N224Y/K226I, K15P/V149R/A154C/G156T/D195G/N224Y/I331W, K15E/G33L/V149R/A154C/G156T/D195G/L317A/I331L, K15E/G33L/A154C/G156T/Y186R/D195G/N224Y/L317A/I331L, K15P/V149R/Y186D/D195G/N224Y/I331L, K15P/G33L/V149R/A154C/G156T/D195G/N224Y/I331W, K15P/V149T/A154C/G156T/N224Y/K226I/L317A/I331W, K15P/G33L/V149T/G156T/D195G/I331W, K15P/V149T/A154C/G156T/Y186D/N224Y/K226I/I331L, A154C/G156T/D195G/N224Y/K226I, K15Y/G33L/K86G/V149R/A154C/G156T/Y186D/D195G/N224Y/L317A/I331W, K15Y/V149R/A154C/G156T/Y186R/D195G/N224Y/K226I, K15P/G33L/V149R/D195G/L317A/I331L, K15E/V149T/A154C/N224Y/I331R, V149T/A154C/G156T/D195G/N224Y/K226I/I331R, K15M/V149R/A154C/D195G/I331L, K15Y/V149R/A154C/G156T/Y186R/D195G, K15E/V149T/A154C/G156T/Y186R/D195G/I331R, K15M/G33L/V149T/A154C/G156T/Y186R/D195G, K15P/G33L/K86G/V149R/A154C/D195G/N224Y/L317A/I331R, or V149R/Y186D/D195G/N224Y/K226I/I331R, wherein the amino acid positions are relative to the reference sequence corresponding to residues 12 to 346 of SEQ ID NO: 42, or relative to the reference sequence corresponding to SEQ ID NO: 42.

[0175] In some embodiments, the engineered RNA ligase comprises an amino acid sequence having at least 80%, 81%, 82%, 83%, 84%, 85%, 86%, 87%, 88%, 89%, 90%, 91%, 92%, 93%, 94%, 95%, 96%, 97%, 98%, 99%, or more sequence identity to the reference sequence corresponding to residues 12 to 346 of SEQ ID NO: 204, or to the reference sequence corresponding to SEQ ID NO: 204, wherein the amino acid sequence comprises one or more substitutions relative to the reference sequence corresponding to residues 12 to 346 of SEQ ID NO: 204, or relative to the reference sequence corresponding to SEQ ID NO: 204.

[0176] In some embodiments, the engineered RNA ligase comprises an amino acid sequence having at least 80%, 81%, 82%, 83%, 84%, 85%, 86%, 87%, 88%, 89%, 90%, 91%, 92%, 93%, 94%, 95%, 96%, 97%, 98%, 99%, or more sequence identity to the reference sequence corresponding to residues 12 to 346 of an even-numbered SEQ ID NO. of SEQ ID NOs: 480-582, to the reference sequence corresponding to an even-numbered SEQ ID NO. of SEQ ID NOs: 480-582, wherein the amino acid sequence comprises one or more substitutions relative to the reference sequence corresponding to residues 12 to 346 of SEQ ID NO: 204, or relative to the reference sequence corresponding to SEQ ID NO: 204.

[0177] In some embodiments, the amino acid sequence of the engineered RNA ligase comprises at least a substitution or substitution set at amino acid position(s) 2/39/69/144/156/316/330, 2/39/69/119/185/316, 69/212/256/330, 39/119/256/316/326/330, 69/116/119/185/330, 2/39/119/144/156/159/202/256/316/326/330, 81/183/185/230, 2/39/69/116/144/156/185, 2/14/39/69/116/119/159/185/256/326, 2/116/119/316, 116/119/144/185/314/316, 39/69/116/144/181/185/256/330, 2/39/69/119/144/156/185/314, 14/39/69/144/156/212/256/314/316/326/330, 39/69/144/156/185/316/330, 156/185/334/335, 39/63/156/230/257/275/330/335, 156/266/316/330/334/335, 39/63/156/183/185/230/330/334, 69/144/316, 116/119/156/202/212/326/330, 39/69/119/138/181/185/316/326, 39/81/156/230, 2/14/69/116/119/144/159/326/330, 39/156/334/345, 230/266/334, 2/116/144/156/159, 156/183/185/230, 2/14/116/316/326/330, 39/63/156/230/316/345, 69/138/144/159/185/202/316, 39/156/257/266/316/334, 156/257/275/334, 183, 89/156/185/230/316/345, 2/14/119, 144/156/316/330, 39/81/185/316/334, 89/230/266/345, 39/156/230/275/316, 39/156/230/266/334/335, 156/185/275/316/330, 119/156/202, 230/257/275/316/330/345, 230, 81/156/330/335/345, 156/183/230/266, 39/185, 39/81/183/275/316/334/345, 156/230/257/316, 39/116/156, or 183/185/257/275/316/330/334, wherein the amino acid positions are relative to the reference sequence corresponding to residues 12 to 346 of SEQ ID NO: 204, or relative to the reference sequence corresponding to SEQ ID NO: 204.

[0178] In some embodiments, the amino acid sequence of the engineered RNA ligase comprises at least a substitution or substitution set 2E/39S/69D/144W/156L/316L/330M, 2V/39S/69D/119T/185K/316L, 69D/212I/256A/330M, 39S/119T/256A/316L/326R/330M, 69D/116N/119T/185K/330M, 2E/39S/119T/144W/156N/159F/202Y/256A/316L/326R/330M, 81Y/183V/185G/230D, 2V/39S/69D/116N/144W/156L/185K, 2E/14K/39S/69D/116N/119T/159F/185K/256A/326R, 2E/116N/119T/316L, 116N/119T/144W/185K/314W/316L, 39S/69D/116N/144W/181D/185K/256A/330M, 2E/39S/69D/119T/144W/156L/185K/314W, 14K/39S/69D/144W/156N/212I/256A/314W/316L/326R/330M, 39S/69D/144W/156L/185K/316L/330M, 156Q/185G/334R/335H, 39Q/63V/156Q/230D/257L/275N/330R/335H, 156Q/266L/316L/330R/334R/335H, 39Q/63V/156Q/183V/185G/230D/330R/334R, 69D/144W/316L, 116N/119T/156L/202Y/212I/326R/330M, 39S/69D/119T/138R/181D/185K/316L/326R, 39Q/81Y/156Q/230D, 2V/14K/69D/116N/119T/144W/159F/326R/330M, 39Q/156A/334R/345V, 230D/266L/334R, 2V/116N/144W/156L/159F, 156A/183V/185G/230D, 2E/14K/116N/316L/326R/330M, 39Q/63V/156A/230D/316L/345V, 69D/138R/144W/159F/185K/202Y/316L, 39Q/156Q/257L/266L/316L/334R, 156Q/257L/275N/334R, 183V, 89W/156A/185G/230D/316L/345V, 2E/14K/119T, 144W/156L/316L/330M, 39Q/81Y/185G/316L/334R, 89H/230D/266L/345V, 39Q/156Q/230D/275N/316L, 39Q/156Q/230D/266L/334R/335H, 156Q/185G/275N/316L/330R, 119T/156N/202Y, 230D/257L/275N/316L/330R/345V, 230D, 81Y/156Q/330R/335H/345V, 156A/183V/230D/266L, 39S/185K, 39Q/81Y/183V/275N/316L/334R/345V, 156A/230D/257L/316L, 39S/116N/156N, or 183V/185G/257L/275N/316L/330R/334R, wherein the amino acid positions are relative to the reference sequence corresponding to residues 12 to 346 of SEQ ID NO: 204, or relative to the reference sequence corresponding to SEQ ID NO: 204.

[0179] In some embodiments, the amino acid sequence of the engineered RNA ligase comprises at least a substitution or substitution set H2E/H39S/T69D/Y144W/T156L/M316L/T330M, H2V/H39S/T69D/Q119T/N185K/M316L, T69D/T212I/K256A/T330M, H39S/Q119T/K256A/M316L/K326R/T330M, T69D/G116N/Q119T/N185K/T330M, H2E/H39S/Q119T/Y144W/T156N/L159F/H202Y/K256A/M316L/K326R/T330M, H81Y/I183V/N185G/N230D, H2V/H39S/T69D/G116N/Y144W/T156L/N185K, H2E/A14K/H39S/T69D/G116N/Q119T/L159F/N185K/K256A/K326R, H2E/G116N/Q119T/M316L, G116N/QI 19T/Y144W/N185K/H314W/M316L, H39S/T69D/G116N/Y144W/K181D/N185K/K256A/T330M, H2E/H39S/T69D/Q119T/Y144W/T156L/N185K/H314W, A14K/H39S/T69D/Y144W/T156N/T212/K256A/H314W/M316L/K326R/T330M, H39S/T69D/Y144W/T156L/N185K/M316L/T330M, T156Q/N185G/Q334R/N335H, H39Q/I63V/T156Q/N230D/V257L/T275N/T330R/N335H, T156Q/V266L/M316L/T330R/Q334R/N335H, H39Q/I63V/T156Q/I183V/N185G/N230D/T330R/Q334R, T69D/Y144W/M316L, G116N/Q119T/T156L/H202Y/T212I/K326R/T330M, H39S/T69D/Q119T/S138R/K181D/N185K/M316L/K326R, H39Q/H81Y/T156Q/N230D, H2V/A14K/T69D/G116N/Q119T/Y44W/L159F/K326R/T330M, H39Q/T156A/Q334R/L345V, N230D/V266L/Q334R, H2V/G116N/Y144W/T156L/L159F, T156A/I183V/N185G/N230D, H2E/A14K/G116N/M316L/K326R/T330M, H39Q/I63V/T156A/N230D/M316L/L345V, T69D/S138R/Y144W/L159F/N185K/H202Y/M316L, H39Q/T156Q/V257L/V266L/M316L/Q334R, T156Q/V257L/T275N/Q334R, I183V, K89W/T156A/N185G/N230D/M316L/L345V, H2E/A14K/Q I19T, Y144W/T156L/M316L/T330M, H39Q/H81Y/N185G/M316L/Q334R, K89H/N230D/V266L/L345V, H39Q/T156Q/N230D/T275N/M316L, H39Q/T156Q/N230D/V266L/Q334R/N335H, T156Q/N185G/T275N/M316L/T330R, Q119T/T156N/H202Y, N230D/V257L/T275N/M316L/T330R/L345V, N230D, H81Y/T156Q/T330R/N335H/L345V, T156A/I183V/N230D/V266L, H39S/N185K, H39Q/H81Y/I183V/T275N/M316L/Q334R/L345V, T156A/N230D/V257L/M316L, H39S/G116N/T156N, or I183V/N185G/V257L/T275N/M316L/T330R/Q334R, wherein the amino acid positions are relative to the reference sequence corresponding to residues 12 to 346 of SEQ ID NO: 204, or relative to the reference sequence corresponding to SEQ ID NO: 204.

[0180] In some embodiments, the amino acid sequence of the engineered RNA ligase comprises at least a substitution at an amino acid position provided in Tables 6.1, 7.1, 8.1, 9.1, 10.1, 11.1, and 12.1, wherein the amino acid positions are relative to the reference sequence corresponding to residues 12 to 346 of SEQ ID NO: 42 or 204, or relative to the reference sequence corresponding to SEQ ID NO: 42 or 204, as provided in each of the Tables.

[0181] In some embodiments, the amino acid sequence of the engineered RNA ligase comprises at least one substitution provided in Tables 6.1, 7.1, 8.1, 9.1, 10.1, 11.1, and 12.1, wherein the amino acid positions are relative to the reference sequence corresponding to residues 12 to 346 of SEQ ID NO: 42 or 204, or relative to the reference sequence corresponding to SEQ ID NO: 42 or 204, as provided in each of the Tables.

[0182] In some embodiments, the amino acid sequence of the engineered RNA ligase comprises at least a substitution or substitution set at the amino acid position(s) provided in Tables 6.1, 7.1, 8.1, 9.1, 10.1, 11.1, and 12.1, wherein the amino acid positions are relative to the reference sequence corresponding to residues 12 to 346 of SEQ ID NO: 42 or 204, or relative to the reference sequence corresponding to SEQ ID NO: 42 or 204, as provided in each of the Tables.

[0183] In some embodiments, the amino acid sequence of the engineered RNA ligase comprises at least a substitution or substitution set of an RNA ligase variant provided in Tables 6.1, 7.1, 8.1, 9.1, 10.1, 11.1, and 12.1, wherein the amino acid positions are relative to the reference sequence corresponding to residues 12 to 346 of SEQ ID NO: 42 or 204, or relative to the reference sequence corresponding to SEQ ID NO: 42 or 204, as provided in each of the Tables.

[0184] In some embodiments, the engineered RNA ligase comprises an amino acid sequence having least 80%, 81%, 82%, 83%, 84%, 85%, 86%, 87%, 88%, 89%, 90%, 91%, 92%, 93%, 94%, 95%, 96%, 97%, 98%, 99% or more sequence identity to a reference sequence comprising a substitution or substitution set provided in Tables 5.1, 6.1, 7.1, 8.1, 9.1, 10.1, 11.1, and 12.1, wherein the amino acid positions are relative to the reference sequence corresponding to residues 12 to 346 of SEQ ID NO: 14, 42, or 204, or relative to the reference sequence corresponding to SEQ ID NO: 14, 42, or 204.

[0185] In some embodiments, the engineered RNA ligase comprises an amino acid sequence having least 80%, 81%, 82%, 83%, 84%, 85%, 86%, 87%, 88%, 89%, 90%, 91%, 92%, 93%, 94%, 95%, 96%, 97%, 98%, 99% or more sequence identity to the sequence comprising residues 12 to 346 of an engineered RNA ligase set forth in Tables 5.1, 6.1, 7.1, 8.1, 9.1, 10.1, 11.1, and 12.1, or to the sequence of an engineered RNA ligase set forth in Tables 5.1, 6.1, 7.1, 8.1, 9.1, 10.1, 11.1, and 12.1.

[0186] In some embodiments, the engineered RNA ligase comprises an amino acid sequence having at least 80%, 81%, 82%, 83%, 84%, 85%, 86%, 87%, 88%, 89%, 90%, 91%, 92%, 93%, 94%, 95%, 96%, 97%, 98%, 99% or more sequence identity to the sequence corresponding to residues 12 to 346 of SEQ ID NO: 24, 26, 28, 30, 32, 34, 336, 38, 40, 42, 44, 46, 48, 50, 52, 54, 56, 58, 60, 62, 64, 66, 68, 70, 72, 74, 76, 78, 80, 82, 84, 86, 88, 90, 92, 94, 96, 98, 100, 102, 104, 106, 108, 110, 112, 114, 116, 118, 120, 122, 124, 126, 128, 130, 132, 134, 136, 138, 140, 142, 144, 146, 148, 150, 152, 154, 156, 158, 160, 162, 164, 166, 168, 170, 172, 174, 176, 178, 180, 182, 184, 186, 188, 190, 192, 194, 196, 198, 200, 202, 204, 206, 208, 210, 212, 214, 216, 218, 220, 222, 224, 226, 228, 230, 232, 234, 236, 238, 240, 242, 244, 246, 248, 250, 252, 254, 256, 258, 260, 262, 264, 266, 268, 270, 272, 274, 276, 278, 280, 282, 284, 286, 288, 290, 292, 294, 296, 298, 300, 302, 304, 306, 308, 310, 312, 314, 316, 318, 320, 322, 324, 326, 328, 330, 332, 334, 336, 338, 340, 342, 344, 346, 348, 350, 352, 354, 356, 358, 360, 362, 364, 366, 368, 370, 372, 374, 376, 378, 380, 382, 384, 386, 388, 390, 392, 394, 396, 398, 400, 402, 404, 406, 408, 410, 412, 414, 416, 418, 420, 422, 424, 426, 428, 430, 432, 434, 436, 438, 440, 442, 444, 446, 448, 450, 452, 454, 456, 458, 460, 462, 464, 466, 468, 470, 472, 474, 476, 478, 480, 482, 484, 486, 488, 490, 492, 494, 496, 498, 500, 502, 504, 506, 508, 510, 512, 514, 516, 518, 520, 522, 524, 526, 528, 530, 532, 534, 536, 538, 540, 542, 544, 546, 548, 550, 552, 554, 556, 558, 560, 562, 564, 568, 570, 572, 574, 576, 578, 580, or 582.

[0187] In some embodiments, the engineered RNA ligase comprises an amino acid sequence having at least 80%, 85%, 86%, 87%, 88%, 89%, 90%, 91%, 92%, 93%, 94%, 95%, 96%, 97%, 98%, 99% or more sequence identity to the sequence corresponding to SEQ ID NO: 24, 26, 28, 30, 32, 34, 336, 38, 40, 42, 44, 46, 48, 50, 52, 54, 56, 58, 60, 62, 64, 66, 68, 70, 72, 74, 76, 78, 80, 82, 84, 86, 88, 90, 92, 94, 96, 98, 100, 102, 104, 106, 108, 110, 112, 114, 116, 118, 120, 122, 124, 126, 128, 130, 132, 134, 136, 138, 140, 142, 144, 146, 148, 150, 152, 154, 156, 158, 160, 162, 164, 166, 168, 170, 172, 174, 176, 178, 180, 182, 184, 186, 188, 190, 192, 194, 196, 198, 200, 202, 204, 206, 208, 210, 212, 214, 216, 218, 220, 222, 224, 226, 228, 230, 232, 234, 236, 238, 240, 242, 244, 246, 248, 250, 252, 254, 256, 258, 260, 262, 264, 266, 268, 270, 272, 274, 276, 278, 280, 282, 284, 286, 288, 290, 292, 294, 296, 298, 300, 302, 304, 306, 308, 310, 312, 314, 316, 318, 320, 322, 324, 326, 328, 330, 332, 334, 336, 338, 340, 342, 344, 346, 348, 350, 352, 354, 356, 358, 360, 362, 364, 366, 368, 370, 372, 374, 376, 378, 380, 382, 384, 386, 388, 390, 392, 394, 396, 398, 400, 402, 404, 406, 408, 410, 412, 414, 416, 418, 420, 422, 424, 426, 428, 430, 432, 434, 436, 438, 440, 442, 444, 446, 448, 450, 452, 454, 456, 458, 460, 462, 464, 466, 468, 470, 472, 474, 476, 478, 480, 482, 484, 486, 488, 490, 492, 494, 496, 498, 500, 502, 504, 506, 508, 510, 512, 514, 516, 518, 520, 522, 524, 526, 528, 530, 532, 534, 536, 538, 540, 542, 544, 546, 548, 550, 552, 554, 556, 558, 560, 562, 564, 566, 568, 570, 572, 574, 576, 578, 580, or 582.

[0188] In some embodiments, the engineered RNA ligase comprises an amino acid sequence comprising residues 12 to 346 of an even numbered SEQ ID NO. of SEQ ID NOs: 24-582, or an amino acid sequence comprising an even numbered SEQ ID NO. of SEQ ID NOs: 24-582. In some embodiments, the amino acid sequence of the engineered RNA ligase optionally includes 1, 2, 3, 4, 5, 6, 7, 8, 9, or up to 10 substitutions, insertions, and/or deletions. In some embodiments, the amino acid sequence of the engineered RNA ligase optionally includes 1, 2, 3, 4, 5, 6, 7, 8, 9, or up to 10 substitutions. In some embodiments, the amino acid sequence of the engineered RNA ligase optionally includes 1, 2, 3, 4, or 5 substitutions, insertions, and/or deletions. In some embodiments, the amino acid sequence of the engineered RNA ligase optionally includes 1, 2, 3, 4, or 5 substitutions.

[0189] In some embodiments, the engineered RNA ligase comprises an amino acid sequence comprising residues 12 to 346 of SEQ ID NO: 24, 26, 28, 30, 32, 34, 336, 38, 40, 42, 44, 46, 48, 50, 52, 54, 56, 58, 60, 62, 64, 66, 68, 70, 72, 74, 76, 78, 80, 82, 84, 86, 88, 90, 92, 94, 96, 98, 100, 102, 104, 106, 108, 110, 112, 114, 116, 118, 120, 122, 124, 126, 128, 130, 132, 134, 136, 138, 140, 142, 144, 146, 148, 150, 152, 154, 156, 158, 160, 162, 164, 166, 168, 170, 172, 174, 176, 178, 180, 182, 184, 186, 188, 190, 192, 194, 196, 198, 200, 202, 204, 206, 208, 210, 212, 214, 216, 218, 220, 222, 224, 226, 228, 230, 232, 234, 236, 238, 240, 242, 244, 246, 248, 250, 252, 254, 256, 258, 260, 262, 264, 266, 268, 270, 272, 274, 276, 278, 280, 282, 284, 286, 288, 290, 292, 294, 296, 298, 300, 302, 304, 306, 308, 310, 312, 314, 316, 318, 320, 322, 324, 326, 328, 330, 332, 334, 336, 338, 340, 342, 344, 346, 348, 350, 352, 354, 356, 358, 360, 362, 364, 366, 368, 370, 372, 374, 376, 378, 380, 382, 384, 386, 388, 390, 392, 394, 396, 398, 400, 402, 404, 406, 408, 410, 412, 414, 416, 418, 420, 422, 424, 426, 428, 430, 432, 434, 436, 438, 440, 442, 444, 446, 448, 450, 452, 454, 456, 458, 460, 462, 464, 466, 468, 470, 472, 474, 476, 478, 480, 482, 484, 486, 488, 490, 492, 494, 496, 498, 500, 502, 504, 506, 508, 510, 512, 514, 516, 518, 520, 522, 524, 526, 528, 530, 532, 534, 536, 538, 540, 542, 544, 546, 548, 550, 552, 554, 556, 558, 560, 562, 564, 566, 568, 570, 572, 574, 576, 578, 580, or 582. In some embodiments, the amino acid sequence of the engineered RNA ligase optionally includes 1, 2, 3, 4, 5, 6, 7, 8, 9, or up to 10 substitutions, insertions, and/or deletions. In some embodiments, the amino acid sequence of the engineered RNA ligase optionally includes 1, 2, 3, 4, 5, 6, 7, 8, 9, or up to 10 substitutions. In some embodiments, the amino acid sequence of the engineered RNA ligase optionally includes 1, 2, 3, 4, or 5 substitutions, insertions, and/or deletions.

[0190] In some embodiments, the amino acid sequence of the engineered RNA ligase optionally includes 1, 2, 3, 4, or 5 substitutions.

[0191] In some embodiments, the engineered RNA ligase comprises an amino acid sequence comprising SEQ ID NO: 24, 26, 28, 30, 32, 34, 336, 38, 40, 42, 44, 46, 48, 50, 52, 54, 56, 58, 60, 62, 64, 66, 68, 70, 72, 74, 76, 78, 80, 82, 84, 86, 88, 90, 92, 94, 96, 98, 100, 102, 104, 106, 108, 110, 112, 114, 116, 118, 120, 122, 124, 126, 128, 130, 132, 134, 136, 138, 140, 142, 144, 146, 148, 150, 152, 154, 156, 158, 160, 162, 164, 166, 168, 170, 172, 174, 176, 178, 180, 182, 184, 186, 188, 190, 192, 194, 196, 198, 200, 202, 204, 206, 208, 210, 212, 214, 216, 218, 220, 222, 224, 226, 228, 230, 232, 234, 236, 238, 240, 242, 244, 246, 248, 250, 252, 254, 256, 258, 260, 262, 264, 266, 268, 270, 272, 274, 276, 278, 280, 282, 284, 286, 288, 290, 292, 294, 296, 298, 300, 302, 304, 306, 308, 310, 312, 314, 316, 318, 320, 322, 324, 326, 328, 330, 332, 334, 336, 338, 340, 342, 344, 346, 348, 350, 352, 354, 356, 358, 360, 362, 364, 366, 368, 370, 372, 374, 376, 378, 380, 382, 384, 386, 388, 390, 392, 394, 396, 398, 400, 402, 404, 406, 408, 410, 412, 414, 416, 418, 420, 422, 424, 426, 428, 430, 432, 434, 436, 438, 440, 442, 444, 446, 448, 450, 452, 454, 456, 458, 460, 462, 464, 466, 468, 470, 472, 474, 476, 478, 480, 482, 484, 486, 488, 490, 492, 494, 496, 498, 500, 502, 504, 506, 508, 510, 512, 514, 516, 518, 520, 522, 524, 526, 528, 530, 532, 534, 536, 538, 540, 542, 544, 546, 548, 550, 552, 554, 556, 558, 560, 562, 564, 566, 568, 570, 572, 574, 576, 578, 580, or 582.

[0192] In some embodiments, the amino acid sequence of the engineered RNA ligase optionally includes 1, 2, 3, 4, 5, 6, 7, 8, 9, or up to 10 substitutions, insertions, and/or deletions. In some embodiments, the amino acid sequence of the engineered RNA ligase optionally includes 1, 2, 3, 4, 5, 6, 7, 8, 9, or up to 10 substitutions. In some embodiments, the amino acid sequence of the engineered RNA ligase optionally includes 1, 2, 3, 4, or 5 substitutions, insertions, and/or deletions. In some embodiments, the amino acid sequence of the engineered RNA ligase optionally includes 1, 2, 3, 4, or 5 substitutions.

[0193] In some embodiments, the engineered RNA ligase comprises an amino acid sequence comprising residues 12 to 346 of SEQ ID NO: 42 or 204, or an amino acid sequence comprising SEQ ID NO: 42 or 204. In some embodiments, the amino acid sequence of the engineered RNA ligase optionally includes 1, 2, 3, 4, 5, 6, 7, 8, 9, or up to 10 substitutions, insertions, and/or deletions. In some embodiments, the amino acid sequence of the engineered RNA ligase optionally includes 1, 2, 3, 4, 5, 6, 7, 8, 9, or up to 10 substitutions. In some embodiments, the amino acid sequence of the engineered RNA ligase optionally includes 1, 2, 3, 4, or 5 substitutions, insertions, and/or deletions. In some embodiments, the amino acid sequence of the engineered RNA ligase optionally includes 1, 2, 3, 4, or 5 substitutions.

[0194] In some of the foregoing embodiments, the engineered RNA ligase polypeptide has 1, 2, 3, 4, or up to 5 substitutions in the amino acid sequence. In some embodiments, the engineered RNA ligase polypeptide has 1, 2, 3, or 4 substitutions in the amino acid sequence. In some embodiments, the substitutions comprises non-conservative or conservative substitutions. In some embodiments, the substitutions comprises conservative substitutions. In some embodiments, the substitutions comprises non-conservative substitutions. In some embodiments, guidance on non-conservative and conservative substitutions are provided by the variants disclosed herein.

[0195] In some embodiments, the engineered RNA ligase of the present disclosure has RNA ligase 2 activity, particularly with the improved or enhanced properties described herein. In some embodiments, the engineered RNA ligase has at least one improved or enhanced property as compared to a reference RNA ligase. Exemplary improved properties are provided in the Examples.

[0196] In some embodiments, the engineered RNA ligase has increased activity as compared to the reference RNA ligase. In some embodiments, the engineered RNA ligase has at least 1.1 fold, 1.2 fold, 1.3 fold, 1.4 fold, 1.5 fold, 2-fold, 3-fold, 4-fold, 5-fold, 10-fold, or more fold activity compared to the reference RNA ligase. In some embodiments, the increased activity is on modified polynucleotide substrates, as discussed herein and in the Examples.

[0197] In some embodiments, the engineered RNA ligase exhibits increased product yield as compared to the reference RNA ligase. In some embodiments, the engineered RNA ligase exhibits increased product yield at substrate concentration of 10 uM to 400 uM, 20 uM to 350 uM, 50 uM to 300 uM, or 100 uM to 250 uM, preferably 200 to 400 uM as compared to the reference RNA ligase. In some embodiments, the engineered RNA ligase exhibits increased product yield at substrate concentration of 10 uM, 20 uM, 50 uM, 100 uM, 150 uM, 200 uM, 250 uM, 300 uM, 350 uM, or 400 uM or higher as compared to the reference RNA ligase.

[0198] In some embodiments, the engineered RNA ligase has increased stability as compared to the reference RNA ligase. In some embodiments, the engineered RNA ligase has increased thermostability as compared to the reference RNA ligase.

[0199] In some embodiments, the engineered RNA ligase has increased activity on polynucleotides substrates with phosphorothioate internucleotide linkages as compared to the reference RNA ligase. In some embodiments, the engineered RNA ligase has increased activity or product yield on polynucleotides substrates with 2′-modifications (e.g., 2′-O-methyl and/or 2′-fluoro) as compared to the reference RNA ligase.

[0200] In some embodiments, the reference RNA ligase has the sequence corresponding to residues 12 to 346 of SEQ ID NO: 14, 42, or 204, or the sequence corresponding to SEQ ID NO: 14, 42, or 204. In some embodiments, the reference RNA ligase has the sequence corresponding to residues 12 to 346 of SEQ ID NO: 14, or the sequence corresponding to SEQ ID NO: 14.

[0201] In some embodiments, the engineered RNA ligase has one or more improved property selected from i) increased activity, ii) increased stability, iii) increased thermostability, iv) increased product yield, v) increased activity on polynucleotides with phosphorothioate internucleotide linkages, vi) increased activity on oligonucleotides with 2′-modifications, vii) increased substrate tolerance, or any combination of i), ii), iii), iv), v), vi), and vii), compared to a reference RNA ligase. In some embodiments, the reference RNA ligase has the sequence corresponding to residues 12 to 346 of SEQ ID NO: 14, 42, or 204, or the sequence corresponding to SEQ ID NO: 14, 42, or 204. In some embodiments, the reference RNA ligase has the sequence corresponding to residues 12 to 346 of SEQ ID NO: 14, or the sequence corresponding to SEQ ID NO: 14.

[0202] In some embodiments, the present disclosure further provides an engineered RNA ligase comprising an amino acid sequence having at least 80%, 85%, 86%, 87%, 88%, 89%, 90%, 91%, 92%, 93%, 94%, 95%, 96%, 97%, 98%, 99% or more sequence identity to the sequence corresponding to:
[0203] residues 12 to 345 of SEQ ID NO: 2;
[0204] residues 12 to 343 of SEQ ID NO: 4;
[0205] residues 12 to 250 of SEQ ID NO: 6;
[0206] residues 12 to 346 of SEQ ID NO: 8;
[0207] residues 12 to 345 of SEQ ID NO: 10;
[0208] residues 12 to 345 of SEQ ID NO: 12;
[0209] residues 12 to 346 of SEQ ID NO: 14;
[0210] residues 12 to 346 of SEQ ID NO: 16;
[0211] residues 12 to 350 of SEQ ID NO: 18;
[0212] residues 12 to 350 of SEQ ID NO: 20; or
[0213] residues 12 to 344 of SEQ ID NO: 22.

[0214] In some embodiments, the engineered RNA ligase comprises an amino acid sequence having at least 80%, 85%, 86%, 87%, 88%, 89%, 90%, 91%, 92%, 93%, 94%, 95%, 96%, 97%, 98%, 99% or more sequence identity to the sequence corresponding to SEQ ID NO: 2, 4, 6, 8, 10, 12, 14, 16, 18, 20 or 22.

[0215] In some embodiments, the engineered RNA ligase comprises an amino acid sequence comprising:
[0216] residues 12 to 345 of SEQ ID NO: 2;
[0217] residues 12 to 343 of SEQ ID NO: 4;
[0218] residues 12 to 250 of SEQ ID NO: 6;
[0219] residues 12 to 346 of SEQ ID NO: 8;
[0220] residues 12 to 345 of SEQ ID NO: 10;
[0221] residues 12 to 345 of SEQ ID NO: 12;
[0222] residues 12 to 346 of SEQ ID NO: 14;
[0223] residues 12 to 346 of SEQ ID NO: 16;
[0224] residues 12 to 350 of SEQ ID NO: 18;
[0225] residues 12 to 350 of SEQ ID NO: 20; or residues 12 to 344 of SEQ ID NO: 22.

[0226] In some embodiments, the engineered RNA ligase comprises an amino acid sequence comprising SEQ ID NO: 2, 4, 6, 8, 10, 12, 14, 16, 18, 20 or 22.

[0227] In some embodiments, the engineered RNA ligase is expressed as a fusion protein. In some embodiments, the engineered RNA ligase described herein can be fused to a variety of polypeptide sequences, such as, by way of example and not limitation, polypeptide tags that can be used for detection and/or purification. In some embodiments, the fusion protein of the engineered RNA ligase comprises a glycine-histidine or histidine-tag (His-tag). In some embodiments, the fusion protein of the engineered RNA ligase comprises an epitope tag, such as c-myc, FLAG, V5, or hemagglutinin (HA). In some embodiments, the fusion protein of the engineered RNA ligase comprises a GST, SUMO, Strep, MBP, or GFP tag. In some embodiments, the fusion is to the amino (N-) terminus of engineered RNA ligase polypeptide. In some embodiments, the fusion is to the carboxy (C-) terminus of the engineered RNA ligase polypeptide.

[0228] In some embodiments, the engineered RNA ligase polypeptide described herein is an isolated composition. In some embodiments, the engineered RNA ligase polypeptide is purified, as further discussed herein. In some embodiments, the engineered RNA ligase is provided in solution, as a lyophilizate, or immobilized on a substrate, as further discussed herein.

[0229] In some embodiments, the present disclosure further provides functional fragments or biologically active fragments of engineered RNA ligase polypeptides described herein. Thus, for each and every embodiment herein of an engineered RNA ligase, a functional fragment or biologically active fragment of the engineered RNA ligase is provided herewith. In some embodiments, a functional fragment or biologically active fragments of an engineered RNA ligase comprises at least about 90%, at least about 95%, at least about 96%, at least about 97%, at least about 98%, or at least about 99% of the activity of the RNA ligase polypeptide from which it was derived (i.e., the parent RNA ligase). In some embodiments, functional fragments or biologically active fragments comprise at least 90%, 91%, 92%, 93%, 94%, 95%, 96%, 97%, 98%, or 99% of the parent sequence of the RNA ligase. In some embodiments, the functional fragment will be truncated by less than 5, less than 10, less than 15, less than 10, less than 25, less than 30, less than 35, less than 40, less than 45, less than 50 amino acids, less than 55 amino acids, less than 60 amino acids, less than 65 amino acids, or less than 70 amino acids.

[0230] In some embodiments, a functional fragment of an engineered RNA ligase herein comprises at least 70%, 75%, 80%, 81%, 82%, 83%, 84%, 85%, 90%, 91%, 92%, 93%, 94%, 95%, 96%, 97%, 98%, or 99% of the parent sequence of the engineered RNA ligase. In some embodiments, the functional fragment will be truncated by less than 5, less than 10, less than 15, less than 10, less than 25, less than 30, less than 35, less than 40, less than 45, less than 50, less than 55, less than 60, less than 65, or less than 70 amino acids.

[0231] In some embodiments, the functional fragments or biologically active fragments of the engineered RNA ligase polypeptide described herein include at least a mutation or mutation set in the amino acid sequence of the engineered RNA ligase described herein. Accordingly, in some embodiments, the functional fragments or biologically active fragments of the engineered RNA ligase displays the enhanced or improved property associated with the mutation or mutation set in the parent RNA ligase.

### Polynucleotides Encoding Engineered Polypeptides, Expression Vectors and Host Cells

[0232] In another aspect, the present disclosure provides recombinant polynucleotides encoding the engineered RNA ligase described herein. In some embodiments, the recombinant polynucleotides are operably linked to one or more heterologous regulatory sequences that control gene expression to create a recombinant polynucleotide construct capable of expressing the engineered RNA ligase. In some embodiments, expression constructs containing at least one heterologous polynucleotide encoding the engineered RNA ligase polypeptide(s) is introduced into appropriate host cells to express the corresponding RNA ligase polypeptide(s).

[0233] As will be apparent to the skilled artisan, availability of a protein sequence and the knowledge of the codons corresponding to the various amino acids provide a description of all the polynucleotides capable of encoding the subject polypeptides. The degeneracy of the genetic code, where the same amino acids are encoded by alternative or synonymous codons, allows an extremely large number of nucleic acids to be made, all of which encode an engineered RNA ligase of the present disclosure. Thus, the present disclosure provides methods and compositions for the production of each and every possible variation of polynucleotides that could be made that encode the engineered RNA ligase polypeptides described herein by selecting combinations based on the possible codon choices, and all such variations of polynucleotides are to be considered specifically disclosed for any polypeptide described herein, including the amino acid sequences presented in the Examples (e.g., in Tables 5.1, 6.1, 7.1, 8.1, 9.1, 10.1, 11.1, and 12.1) and in the accompanying Sequence Listing.

[0234] In some embodiments, the codons are preferably optimized for utilization by the chosen host cell for protein production. In some embodiments, preferred codons in bacterial cells are used for expression in bacterial cells. In some embodiments, preferred codons in fungal cells are used for expression in fungal cells. In some embodiments, preferred codons in insect cells are used for expression in insect cells. In some embodiments, preferred codons in mammalian cells are used for expression in mammalian cells. In some embodiments, codon optimized polynucleotides encoding an engineered RNA ligase polypeptide described herein contain preferred codons at about 40%, 50%, 60%, 70%, 80%, 90%, or greater than 90% of the codon positions in the full length coding region.

[0235] Accordingly, in some embodiments, a recombinant polynucleotide of the present disclosure encodes an engineered RNA ligase polypeptides described herein. In some embodiments, the polynucleotide sequence of the recombinant polynucleotide is codon optimized.

[0236] In some embodiments, the recombinant polynucleotide comprises a polynucleotide sequence encoding an engineered RNA ligase comprising an amino acid sequence having at least 80%, 81%, 82%, 83%, 84%, 85%, 86%, 87%, 88%, 89%, 90%, 91%, 92%, 93%, 94%, 95%, 96%, 97%, 98%, 99%, or more sequence identity to a reference sequence corresponding to residues 12 to 346 of an even-numbered SEQ ID NO. of SEQ ID NOs: 14 and 24-582, or to a reference sequence corresponding to an even-numbered SEQ ID NO. of SEQ ID NOs: 14 and 24-582, wherein the amino acid sequence comprises one or more substitutions relative to the reference sequence corresponding to residues 12 to 346 of SEQ ID NO: 14, 42, or 204, or relative to the reference sequence corresponding to SEQ ID NO: 14, 42, or 204.

[0237] In some embodiments, the recombinant polynucleotide comprises a polynucleotide sequence encoding an engineered RNA ligase comprising an amino acid sequence having at least 80%, 81%, 82%, 83%, 84%, 85%, 86%, 87%, 88%, 89%, 90%, 91%, 92%, 93%, 94%, 95%, 96%, 97%, 98%, 99%, or more sequence identity to the reference sequence corresponding to residues 12 to 346 of SEQ ID NO: 14, 42, or 204, or to the reference sequence corresponding to SEQ ID NO: 14, 42, or 204, wherein the amino acid sequence comprises one or more substitutions relative to the reference sequence corresponding to residues 12 to 346 of SEQ ID NO: 14, 42, or 204, or relative to the reference sequence corresponding to SEQ ID NO: 14, 42, or 204.

[0238] In some embodiments, the recombinant polynucleotide comprises a polynucleotide sequence encoding an engineered RNA ligase comprising an amino acid sequence having at least 80%, 81%, 82%, 83%, 84%, 85%, 86%, 87%, 88%, 89%, 90%, 91%, 92%, 93%, 94%, 95%, 96%, 97%, 98%, 99%, or more sequence identity to the reference sequence corresponding to residues 12 to 346 of SEQ ID NO: 14, or to the reference sequence corresponding to SEQ ID NO: 14, wherein the amino acid sequence comprises one or more substitutions relative to the reference sequence corresponding to residues 12 to 346 of SEQ ID NO: 14, or relative to the reference sequence corresponding to SEQ ID NO: 14.

[0239] In some embodiments, the recombinant polynucleotide comprises a polynucleotide sequence encoding an engineered RNA ligase comprising an amino acid sequence having at least 80%, 81%, 82%, 83%, 84%, 85%, 86%, 87%, 88%, 89%, 90%, 91%, 92%, 93%, 94%, 95%, 96%, 97%, 98%, 99%, or more sequence identity to the reference sequence corresponding to residues 12 to 346 of SEQ ID NO: 42 or 204, or to the reference sequence corresponding to SEQ ID NO: 42 or 204, wherein the amino acid sequence comprises one or more substitutions relative to the reference sequence corresponding to residues 12 to 346 of SEQ ID NO: 14, or relative to the reference sequence corresponding to SEQ ID NO: 14.

[0240] In some embodiments, the recombinant polynucleotide encodes an engineered RNA ligase comprising an amino acid sequence having at least 80%, 81%, 82%, 83%, 84%, 85%, 86%, 87%, 88%, 89%, 90%, 91%, 92%, 93%, 94%, 95%, 96%, 97%, 98%, 99% or more sequence identity to the reference sequence corresponding to residues 12 to 346 of an even numbered SEQ ID NO. of SEQ ID NOs: 24-582, or to the reference sequence corresponding to an even numbered SEQ ID NO. of SEQ ID NOs: 24-582, wherein the amino acid sequence comprises one or more substitutions relative to the reference sequence corresponding to residues 12 to 346 of SEQ ID NO: 14, or relative to the reference sequence corresponding to SEQ ID NO: 14.

[0241] In some embodiments, the recombinant polynucleotide encodes an engineered RNA ligase comprising an amino acid sequence having at least 80%, 81%, 82%, 83%, 84%, 85%, 86%, 87%, 88%, 89%, 90%, 91%, 92%, 93%, 94%, 95%, 96%, 97%, 98%, 99%, or more sequence identity to the reference sequence corresponding to residues 12 to 346 of an even-numbered SEQ ID NO. of SEQ ID NOs: 24-128, or to the reference sequence corresponding to an even-numbered SEQ ID NO. of SEQ ID NOs: 24-128, wherein the amino acid sequence comprises one or more substitutions relative to the reference sequence corresponding to residues 12 to 346 of SEQ ID NO: 14, or relative to the reference sequence corresponding to SEQ ID NO: 14.

[0242] In some embodiments, the recombinant polynucleotide comprises a polynucleotide sequence encoding an engineered RNA ligase comprising an amino acid sequence comprising at least a substitution at amino acid position 2, 14, 15, 18, 33, 39, 63, 69, 81, 83, 85, 86, 89, 95, 116, 117, 119, 138, 142, 144, 149, 154, 156, 159, 171, 175, 177, 181, 185, 186, 195, 202, 212, 214, 224, 226, 230, 247, 256, 257, 260, 266, 275, 280, 283, 285, 288, 291, 296, 303, 306, 307, 310, 314, 315, 316, 317, 326, 330, 331, 333, 334, 335, 337, 339, 342, or 345, or combinations thereof, wherein the amino acid positions are relative to the reference sequence corresponding to residues 12 to 346 of SEQ ID NO: 14, or relative to the reference sequence corresponding to SEQ ID NO: 14.

[0243] In some embodiments, the recombinant polynucleotide comprises a polynucleotide sequence encoding an engineered RNA ligase comprising an amino acid sequence comprising at least a substitution at amino acid position 95 or 177, or combination thereof, wherein the amino acid positions are relative to the reference sequence corresponding to residues 12 to 346 of SEQ ID NO: 14, or relative to the reference sequence corresponding to SEQ ID NO: 14.

[0244] In some embodiments, the recombinant polynucleotide comprises a polynucleotide sequence encoding an engineered RNA ligase comprising an amino acid sequence comprising at least a substitution at amino acid position 15, 95, 149, 154, 156, 177, 186, 195, 224, or 226, or combinations thereof, wherein the amino acid positions are relative to the reference sequence corresponding to residues 12 to 346 of SEQ ID NO: 14, or relative to the reference sequence corresponding to SEQ ID NO: 14.

[0245] In some embodiments, the recombinant polynucleotide comprises a polynucleotide sequence encoding an engineered RNA ligase comprising an amino acid sequence comprising at least a substitution or substitution set at amino acid position(s) 177/260/307/345, 171/175/183/280/283/303, 95/159/177/260/288, 175/183/247/280/283/296, 177/307, 81/171/183/335, 175/183, 81/175/183/280/296/335/339, 81/183/247/266, 95/177, 171/280/283/296/303, 85/177/260/288/333/345, 177/291/307/333, 81/171/175/183/316/337, 81/171/266/280/283/335/339, 177, 95/159/177/260/280/288/306/345, 171/175/335, 177/260/30/333, 14/95/177/288/307, 95/177/345, 95/159/177/260/285/288, 266/296, 81/283/335/337, 95/159/177/260/342/345, 63/171/175/183/266/280/296/316, 280/335/337, 81/171/280, 81/171/175/296/316, 171/175/316/335, 171/280/283/296/316, 171/283/335, 63/171/175/183/266/283/303/316, 171/247/266/283/296/303/316/335, 63/81/171/175/183/266/280/283/337, 81/171/303/316/335, 288/307, 14/95/159/177/345, 81/171/175/183/247/266/280/283, 81/247/266, 280, 85/177/260, 63/183, 175/183/247/280/283/316, 291, 247, 171/280/283, 81/171/175/280/316, 333, 171/296/316, 81/171, or 280/316/335, wherein the amino acid positions are relative to the reference sequence corresponding to residues 12 to 346 of SEQ ID NO: 14, or relative to the reference sequence corresponding to SEQ ID NO: 14.

[0246] In some embodiments, the recombinant polynucleotide comprises a polynucleotide sequence encoding an engineered RNA ligase comprising an amino acid sequence comprising at least a substitution at an amino acid position provided in Tables 5.1, 6.1, 7.1, 8.1, 9.1, 10.1, 11.1, and 12.1, wherein the amino acid positions are relative to the reference sequence corresponding to residues 12 to 346 of SEQ ID NO: 14, or relative to the reference sequence corresponding to SEQ ID NO: 14.

[0247] In some embodiments, the recombinant polynucleotide comprises a polynucleotide sequence encoding an engineered RNA ligase comprising an amino acid sequence comprising at least one substitution provided in Tables 5.1, 6.1, 7.1, 8.1, 9.1, 10.1, 11.1, and 12.1, wherein the amino acid positions are relative to the reference sequence corresponding to residues 12 to 346 of SEQ ID NO: 14, or relative to the reference sequence corresponding to SEQ ID NO: 14.

[0248] In some embodiments, the recombinant polynucleotide comprises a polynucleotide sequence encoding an engineered RNA ligase comprising an amino acid sequence comprising at least a substitution or substitution set at the amino acid position(s) set forth in Tables 5.1, 6.1, 7.1, 8.1, 9.1, 10.1, 11.1, and 12.1, wherein the amino acid positions are relative to the reference sequence corresponding to residues 12 to 346 of SEQ ID NO: 14, or relative to the reference sequence corresponding to SEQ ID NO: 14.

[0249] In some embodiments, the recombinant polynucleotide comprises a polynucleotide sequence encoding an engineered RNA ligase comprising an amino acid sequence comprising at least a substitution or substitution set of an RNA ligase variant set forth in Tables 5.1, 6.1, 7.1, 8.1, 9.1, 10.1, 11.1, and 12.1, wherein the amino acid positions are relative to the reference sequence corresponding to residues 12 to 346 of SEQ ID NO: 14, or relative to the reference sequence corresponding to SEQ ID NO: 14.

[0250] In some embodiments, the recombinant polynucleotide comprises a polynucleotide sequence encoding an engineered RNA ligase comprising an amino acid sequence having at least 80%, 81%, 82%, 83%, 84%, 85%, 86%, 87%, 88%, 89%, 90%, 91%, 92%, 93%, 94%, 95%, 96%, 97%, 98%, 99%, or more sequence identity to the reference sequence corresponding to residues 12 to 346 of SEQ ID NO: 42 or 204, or to the reference sequence corresponding to SEQ ID NO: 42 or 204.

[0251] In some embodiments, the recombinant polynucleotide comprises a polynucleotide sequence encoding an engineered RNA ligase comprising an amino acid sequence having at least 80%, 81%, 82%, 83%, 84%, 85%, 86%, 87%, 88%, 89%, 90%, 91%, 92%, 93%, 94%, 95%, 96%, 97%, 98%, 99%, or more sequence identity to the reference sequence corresponding to residues 12 to 346 of an even-numbered SEQ ID NO. of SEQ ID NOs: 24-582, or to the reference sequence corresponding to an even-numbered SEQ ID NO. of SEQ ID NOs: 24-582.

[0252] In some embodiments, the recombinant polynucleotide comprises a polynucleotide sequence encoding an engineered RNA ligase comprising an amino acid sequence having at least 80%, 81%, 82%, 83%, 84%, 85%, 86%, 87%, 88%, 89%, 90%, 91%, 92%, 93%, 94%, 95%, 96%, 97%, 98%, 99%, or more sequence identity to the reference sequence corresponding to residues 12 to 346 of SEQ ID NO: 42 or 204, or to the reference sequence corresponding to SEQ ID NO: 42 or 204, wherein the amino acid sequence comprises one or more substitutions relative to the reference sequence corresponding to residues 12 to 346 of SEQ ID NO: 42 or 204, or relative to the reference sequence corresponding to SEQ ID NO: 42 or 204.

[0253] In some embodiments, the recombinant polynucleotide comprises a polynucleotide sequence encoding an engineered RNA ligase comprising an amino acid sequence having at least 80%, 81%, 82%, 83%, 84%, 85%, 86%, 87%, 88%, 89%, 90%, 91%, 92%, 93%, 94%, 95%, 96%, 97%, 98%, 99%, or more sequence identity to the reference sequence corresponding to residues 12 to 346 of an even numbered SEQ ID NO. of SEQ ID NOs: 24-582, or to the reference sequence corresponding to an even numbered SEQ ID NO. of SEQ ID NOs: 24-582, wherein the amino acid sequence comprises one or more substitutions relative to the reference sequence corresponding to residues 12 to 346 of SEQ ID NO: 42 or 204, or relative to the reference sequence corresponding to SEQ ID NO: 42 or 204.

[0254] In some embodiments, the recombinant polynucleotide comprises a polynucleotide sequence encoding an engineered RNA ligase comprising an amino acid sequence comprising at least a substitution at amino acid position 2, 14, 15, 18, 33, 39, 63, 69, 81, 83, 85, 86, 89, 95, 116, 117, 119, 138, 142, 144, 149, 154, 156, 159, 171, 175, 177, 181, 185, 186, 195, 202, 212, 214, 224, 226, 230, 247, 256, 257, 260, 266, 275, 280, 283, 285, 288, 291, 296, 303, 306, 307, 310, 314, 315, 316, 317, 326, 330, 331, 333, 334, 335, 337, 339, 342, or 345, or combinations thereof, wherein the amino acid positions are relative to the reference sequence corresponding to residues 12 to 346 of SEQ ID NO: 42 or 204, or relative to the reference sequence corresponding to SEQ ID NO: 42 or 204.

[0255] In some embodiments, the recombinant polynucleotide comprises a polynucleotide sequence encoding an engineered RNA ligase comprising an amino acid sequence comprising at least a substitution at amino acid position 95 or 177, or combination thereof, wherein the amino acid positions are relative to the reference sequence corresponding to residues 12 to 346 of SEQ ID NO: 42 or 204, or relative to the reference sequence corresponding to SEQ ID NO: 42 or 204.

[0256] In some embodiments, the recombinant polynucleotide comprises a polynucleotide sequence encoding an engineered RNA ligase comprising an amino acid sequence comprising at least a substitution at amino acid position 15, 95, 149, 154, 156, 177, 186, 195, 224, or 226, or combinations thereof, wherein the amino acid positions are relative to the reference sequence corresponding to residues 12 to 346 of SEQ ID NO: 42 or 204, or relative to the reference sequence corresponding to SEQ ID NO: 42 or 204.

[0257] In some embodiments, the recombinant polynucleotide comprises a polynucleotide sequence encoding an engineered RNA ligase comprising an amino acid sequence having at least 80%, 81%, 82%, 83%, 84%, 85%, 86%, 87%, 88%, 89%, 90%, 91%, 92%, 93%, 94%, 95%, 96%, 97%, 98%, 99%, or more sequence identity to the reference sequence corresponding to residues 12 to 346 of SEQ ID NO: 42, or to the reference sequence corresponding to SEQ ID NO: 42, wherein the amino acid sequence comprises one or more substitutions relative to the reference sequence corresponding to residues 12 to 346 of SEQ ID NO: 42, or relative to the reference sequence corresponding to SEQ ID NO: 42.

[0258] In some embodiments, the recombinant polynucleotide comprises a polynucleotide sequence encoding an engineered RNA ligase comprising an amino acid sequence having at least 80%, 81%, 82%, 83%, 84%, 85%, 86%, 87%, 88%, 89%, 90%, 91%, 92%, 93%, 94%, 95%, 96%, 97%, 98%, 99%, or more sequence identity to the reference sequence corresponding to residues 12 to 346 of an even-numbered SEQ ID NO. of SEQ ID NOs: 130-478, or to the reference sequence corresponding to an even-numbered SEQ ID NO. of SEQ ID NOs: 130-478, wherein the amino acid sequence comprises one or more substitutions relative to the reference sequence corresponding to residues 12 to 346 of SEQ ID NO: 42, or relative to the reference sequence corresponding to SEQ ID NO: 42.

[0259] In some embodiments, the recombinant polynucleotide comprises a polynucleotide sequence encoding an engineered RNA ligase comprising an amino acid sequence comprising at least a substitution or substitution set at amino acid position(s) 149/156/195, 15/149/186/224/317, 15/156/195/224/226/317/331, 15/195/317/331, 149/224/331, 15/195/224/226/317/331, 15/33/86/149/154/195/317, 15/86/154/156/186/195/224/226/331, 15/149/224/317/331, 15/154/156/186/317/331, 15/33/149/224/226/331, 15/186/224/226/317/331, 15/33/149/186/224/331, 195/224/331, 15/86/156/186/195/226/317/331, 15/195/22/331, 156/186/224/226/331, 15/149/154/156/224/226, 33/156/186/195/331, 15/86/149/154/156/317/331, 15/186/317/331, 15/86/149/154/195/331, 15/33/149/154/156/226, 15/149/154/186/317/331, 195/331, 15/86/156/186/195/331, 149/156/224/226/331, 15/149/154/156/186/317/331, 15/154/186/195, 15/86/195/224/226, 230, 15/33/156/331, 15/33/156/195/224/226, 33/149/156/317, 15/33/186/195, 334, 15/154/156/224/317, 15/149/186/331, 15/86/149/186/195/317, 15/33/154/195, 15/156/186/331, 15/149/186/317, 15/33/156/186/214/224/331, 15/86/186/224/226/317, 15/154/331, 15/149/154/226, 15/33/195/226, 15/224/317/331, 15/86/186/195/317, 226/317/331, 330, 89, 15/149/186, 156/195/331, 156, 15/86/156/186/331, 275, 15/33/186/224, 15/186/317, 15/33/186/226/317, 15/149/154/156/331, 15/154/226/317, 15/86/156/186/195/317, 257, 15/154/156/186, 33/186/224, 335, 15/86/156/186/195/224/331, 154/156/317, 39, 2, 15/224/226/331, 15/33/149/224, 89/307, 15/154/156/317, 15/186/331, 15/33/154/317, 15/33/195/224/317, 15/156/224/226, 154/186/331, 185, 15/18/149/186/195, 86/149/154/156, 15/33/149/331, 326, 202, 119, 212, 15/33/156/317, 280, 142, 15/149, 15/33/86/156/195, 315, 256, 15/33/156/186, 138, 117, 116, 316, 69, 310, 317, 15/195/331, 15/33/331, 314, or 144, wherein the amino acid positions are relative to the reference sequence corresponding to residues 12 to 346 of SEQ ID NO: 42, or relative to the reference sequence corresponding to SEQ ID NO: 42.

[0260] In some embodiments, the recombinant polynucleotide comprises a polynucleotide sequence encoding an engineered RNA ligase comprising an amino acid sequence comprising at least a substitution or substitution set at amino acid position(s) 15/33/149/154/186/195, 149/156/186/195/224/226/317, 15/149/156/195/224/226, 15/33/86/149/154/156/186/195/226/331, 15/149/156/186/195/224/317/331, 15/33/149/154/195/317, 15/149/154/195/224/317, 15/149/156/186/224/226/317/331, 15/33/149/154/156/186/195/224/226/317/331, 149/195/224, 86/149/154/156/186/195/331, 15/33/149/156/195/224/317/331, 15/149/154/156/186/195/317/331, 15/33/149/154/156/186/224/331, 15/149/154/156/195/224, 15/149/154/156/195/224/226, 15/149/154/156/186/195/224/317, 33/149/156/186/224/331, 15/33/86/149/195/224/331, 15/86/149/154/156/186/195/331, 149/186/195/331, 15/154/156/186/226/331, 15/149/154/186/195/224/226, 15/149/154/156/195/224/331, 15/33/149/154/156/195/317/331, 15/33/154/156/186/195/224/317/331, 15/149/186/195/224/331, 15/33/149/154/156/195/224/331, 15/149/154/156/224/226/317/331, 15/33/149/156/195/331, 15/149/154/156/186/224/226/331, 154/156/195/224/226, 15/33/86/149/154/156/186/195/224/317/331, 15/149/154/156/186/195/224/226, 15/33/149/195/317/331, 15/149/154/224/331, 149/154/156/195/224/226/331, 15/149/154/195/331, 15/149/154/156/186/195, 15/33/149/154/156/186/195, 15/33/86/149/154/195/224/317/331, or 149/186/195/224/226/331, wherein the amino acid positions are relative to the reference sequence corresponding to residues 12 to 346 of SEQ ID NO: 42, or relative to the reference sequence corresponding to SEQ ID NO: 42.

[0261] In some embodiments, the recombinant polynucleotide comprises a polynucleotide sequence encoding an engineered RNA ligase comprising an amino acid sequence having at least 80%, 81%, 82%, 83%, 84%, 85%, 86%, 87%, 88%, 89%, 90%, 91%, 92%, 93%, 94%, 95%, 96%, 97%, 98%, 99%, or more sequence identity to the reference sequence corresponding to residues 12 to 346 of SEQ ID NO: 204, or to the reference sequence corresponding to SEQ ID NO: 204, wherein the amino acid sequence comprises one or more substitutions relative to the reference sequence corresponding to residues 12 to 346 of SEQ ID NO: 204, or relative to the reference sequence corresponding to SEQ ID NO: 204.

[0262] In some embodiments, the recombinant polynucleotide comprises a polynucleotide sequence encoding an engineered RNA ligase comprising an amino acid sequence having at least 80%, 81%, 82%, 83%, 84%, 85%, 86%, 87%, 88%, 89%, 90%, 91%, 92%, 93%, 94%, 95%, 96%, 97%, 98%, 99%, or more sequence identity to the reference sequence corresponding to residues 12 to 346 of an even-numbered SEQ ID NO. of SEQ ID NOs: 480-582, to the reference sequence corresponding to an even-numbered SEQ ID NO. of SEQ ID NOs: 480-582, wherein the amino acid sequence comprises one or more substitutions relative to the reference sequence corresponding to residues 12 to 346 of SEQ ID NO: 204, or relative to the reference sequence corresponding to SEQ ID NO: 204.

[0263] In some embodiments, the recombinant polynucleotide comprises a polynucleotide sequence encoding an engineered RNA ligase comprising an amino acid sequence comprising at least a substitution or substitution set at amino acid position(s) 2/39/69/144/156/316/330, 2/39/69/119/185/316, 69/212/256/330, 39/119/256/316/326/330, 69/116/119/185/330, 2/39/119/144/156/159/202/256/316/326/330, 81/183/185/230, 2/39/69/116/144/156/185, 2/14/39/69/116/119/159/185/256/326, 2/116/119/316, 116/119/144/185/314/316, 39/69/116/144/181/185/256/330, 2/39/69/119/144/156/185/314, 14/39/69/144/156/212/256/314/316/326/330, 39/69/144/156/185/316/330, 156/185/334/335, 39/63/156/230/257/275/330/335, 156/266/316/330/334/335, 39/63/156/183/185/230/330/334, 69/144/316, 116/119/156/202/212/326/330, 39/69/119/138/181/185/316/326, 39/81/156/230, 2/14/69/116/119/144/159/326/330, 39/156/334/345, 230/266/334, 2/116/144/156/159, 156/183/185/230, 2/14/116/316/326/330, 39/63/156/230/316/345, 69/138/144/159/185/202/316, 39/156/257/266/316/334, 156/257/275/334, 183, 89/156/185/230/316/345, 2/14/119, 144/156/316/330, 39/81/185/316/334, 89/230/266/345, 39/156/230/275/316, 39/156/230/266/334/335, 156/185/275/316/330, 119/156/202, 230/257/275/316/330/345, 230, 81/156/330/335/345, 156/183/230/266, 39/185, 39/81/183/275/316/334/345, 156/230/257/316, 39/116/156, or 183/185/257/275/316/330/334, wherein the amino acid positions are relative to the reference sequence corresponding to residues 12 to 346 of SEQ ID NO: 204, or relative to the reference sequence corresponding to SEQ ID NO: 204.

[0264] In some embodiments, the recombinant polynucleotide comprises a polynucleotide sequence encoding an engineered RNA ligase comprising an amino acid sequence comprising a substitution at an amino acid position provided in Tables 6.1, 7.1, 8.1, 9.1, 10.1, 11.1, and 12.1, wherein the amino acid positions are relative to the reference sequence corresponding to residues 12 to 346 of SEQ ID NO: 42 or 204, or relative to the reference sequence corresponding to SEQ ID NO: 42 or 204, as provided in each of the Tables.

[0265] In some embodiments, the recombinant polynucleotide comprises a polynucleotide sequence encoding an engineered RNA ligase comprising an amino acid sequence comprising at least one substitution provided in Tables 6.1, 7.1, 8.1, 9.1, 10.1, 11.1, and 12.1, wherein the amino acid positions are relative to the reference sequence corresponding to residues 12 to 346 of SEQ ID NO: 42 or 204, or relative to the reference sequence corresponding to SEQ ID NO: 42 or 204, as provided in each of the Tables.

[0266] In some embodiments, the recombinant polynucleotide comprises a polynucleotide sequence encoding an engineered RNA ligase comprising at least a substitution or substitution set at amino acid position(s) provided in Tables 6.1, 7.1, 8.1, 9.1, 10.1, 11.1, and 12.1, wherein the amino acid positions are relative to the reference sequence corresponding to residues 12 to 346 of SEQ ID NO: 42 or 204, or relative to the reference sequence corresponding to SEQ ID NO: 42 or 204, as provided in each of the Tables.

[0267] In some embodiments, the recombinant polynucleotide comprises a polynucleotide sequence encoding an engineered RNA ligase comprising at least a substitution or substitution set of an RNA ligase variant provided in Tables 6.1, 7.1, 8.1, 9.1, 10.1, 11.1, and 12.1, wherein the amino acid positions are relative to the reference sequence corresponding to residues 12 to 346 of SEQ ID NO: 42 or 204, or relative to the reference sequence corresponding to SEQ ID NO: 42 or 204, as provided in each of the Tables.

[0268] In some embodiments, the recombinant polynucleotide comprises a polynucleotide sequence encoding an engineered RNA ligase comprising an amino acid sequence having least 80%, 81%, 82%, 83%, 84%, 85%, 86%, 87%, 88%, 89%, 90%, 91%, 92%, 93%, 94%, 95%, 96%, 97%, 98%, 99% or more sequence identity to a reference sequence comprising a substitution or substitution set provided in Tables 5.1, 6.1, 7.1, 8.1, 9.1, 10.1, 11.1, and 12.1, wherein the amino acid positions are relative to the reference sequence corresponding to residues 12 to 346 of SEQ ID NO: 14, 42, or 204, or relative to the reference sequence corresponding to SEQ ID NO: 14, 42, or 204.

[0269] In some embodiments, the recombinant polynucleotide comprises a polynucleotide sequence encoding an engineered RNA ligase comprising an amino acid sequence having least 80%, 81%, 82%, 83%, 84%, 85%, 86%, 87%, 88%, 89%, 90%, 91%, 92%, 93%, 94%, 95%, 96%, 97%, 98%, 99% or more sequence identity to the sequence comprising residues 12 to 346 of an engineered RNA ligase set forth in Tables 5.1, 6.1, 7.1, 8.1, 9.1, 10.1, 11.1, and 12.1, or to the sequence of an engineered RNA ligase set forth in Tables 5.1, 6.1, 7.1, 8.1, 9.1, 10.1, 11.1, and 12.1.

[0270] In some embodiments, the recombinant polynucleotide comprises a polynucleotide sequence encoding an engineered RNA ligase comprising residues 12 to 346 of an even numbered SEQ ID NO. of SEQ ID NOs: 24-582, or an amino acid sequence comprising an even numbered SEQ ID NO. of SEQ ID NOs: 24-582, optionally wherein the amino acid sequence has 1, 2, 3, 4, 5, 6, 7, 8, 9, or up to 10 substitutions.

[0271] In some embodiments, the recombinant polynucleotide comprises a polynucleotide sequence encoding an engineered RNA ligase comprising residues 12 to 346 of SEQ ID NO: 42 or 204, or an amino acid sequence comprising SEQ ID NO: 42 or 204, optionally wherein the amino acid sequence has 1, 2, 3, 4, 5, 6, 7, 8, 9, or up to 10 substitutions in the amino acid sequence.

[0272] In some embodiments, the recombinant polynucleotide comprises a polynucleotide sequence having at least 70%, 75%, 80%, 81%, 82%, 83%, 84%, 85%, 90%, 91%, 92%, 93%, 94%, 95%, 96%, 97%, 98%, 99%, or more sequence identity to a reference polynucleotide sequence corresponding to nucleotide residues 34 to 1038 of an odd numbered SEQ ID NO. of SEQ ID NOs: 13-581, or to a reference polynucleotide sequence corresponding to an odd numbered SEQ ID NO. of SEQ ID NOs: 13-581, wherein the recombinant polynucleotide encodes an RNA ligase.

[0273] In some embodiments, the recombinant polynucleotide comprises a polynucleotide sequence having at least 70%, 75%, 80%, 81%, 82%, 83%, 84%, 85%, 90%, 91%, 92%, 93%, 94%, 95%, 96%, 97%, 98%, 99%, or more sequence identity to a reference polynucleotide sequence corresponding to nucleotide residues 34 to 1038 of SEQ ID NO: 13, 41, or 203, or to a reference polynucleotide sequence corresponding to SEQ ID NO: 13, 41, or 203, wherein the recombinant polynucleotide encodes an RNA ligase.

[0274] In some embodiments, the recombinant polynucleotide comprises a polynucleotide sequence having at least 70%, 75%, 80%, 81%, 82%, 83%, 84%, 85%, 86%, 87%, 88%, 89%, 90%, 91%, 92%, 93%, 94%, 95%, 96%, 97%, 98%, 99% or more sequence identity to the reference sequence corresponding to nucleotide residues 34 to 1038 of SEQ ID NO: 23, 25, 27, 29, 31, 33, 35, 37, 39, 41, 43, 45, 47, 49, 51, 53, 55, 57, 59, 61, 63, 65, 67, 69, 71, 73, 75, 77, 79, 81, 83, 85, 87, 89, 91, 93, 95, 97, 99, 101, 103, 105, 107, 109, 111, 113, 115, 117, 119, 121, 123, 125, 127, 129, 131, 133, 135, 137, 139, 141, 143, 145, 147, 149, 151, 153, 155, 157, 159, 161, 163, 165, 167, 169, 171, 173, 175, 177, 179, 181, 183, 185, 187, 189, 191, 193, 195, 197, 199, 201, 203, 205, 207, 209, 211, 213, 215, 217, 219, 221, 223, 225, 227, 229, 231, 233, 235, 237, 239, 241, 243, 245, 247, 249, 251, 253, 255, 257, 259, 261, 263, 265, 267, 269, 271, 273, 275, 277, 279, 281, 283, 285, 287, 289, 291, 293, 295, 297, 299, 301, 303, 305, 307, 309, 311, 313, 315, 317, 319, 321, 323, 325, 327, 329, 331, 333, 335, 337, 339, 341, 343, 345, 347, 349, 351, 353, 355, 357, 359, 361, 363, 365, 367, 369, 371, 373, 375, 377, 379, 381, 383, 385, 387, 389, 391, 393, 395, 397, 399, 401, 403, 405, 407, 409, 411, 413, 415, 417, 419, 421, 423, 425, 427, 429, 431, 433, 435, 437, 439, 441, 443, 445, 447, 449, 451, 453, 455, 457, 459, 461, 463, 465, 467, 469, 471, 473, 475, 477, 479, 481, 483, 485, 487, 489, 491, 493, 495, 497, 499, 501, 503, 505, 507, 509, 511, 513, 515, 517, 519, 521, 523, 525, 527, 529, 531, 533, 535, 537, 539, 541, 543, 545, 547, 549, 551, 553, 555, 557, 559, 561, 563, 565, 567, 569, 571, 573, 575, 577, 579, or 581, wherein the recombinant polynucleotide encodes an RNA ligase.

[0275] In some embodiments, the recombinant polynucleotide comprises a polynucleotide sequence having at least 70%, 75%, 80%, 81%, 82%, 83%, 84%, 85%, 86%, 87%, 88%, 89%, 90%, 91%, 92%, 93%, 94%, 95%, 96%, 97%, 98%, 99% or more sequence identity to the reference sequence corresponding to SEQ ID NO: 23, 25, 27, 29, 31, 33, 35, 37, 39, 41, 43, 45, 47, 49, 51, 53, 55, 57, 59, 61, 63, 65, 67, 69, 71, 73, 75, 77, 79, 81, 83, 85, 87, 89, 91, 93, 95, 97, 99, 101, 103, 105, 107, 109, 111, 113, 115, 117, 119, 121, 123, 125, 127, 129, 131, 133, 135, 137, 139, 141, 143, 145, 147, 149, 151, 153, 155, 157, 159, 161, 163, 165, 167, 169, 171, 173, 175, 177, 179, 181, 183, 185, 187, 189, 191, 193, 195, 197, 199, 201, 203, 205, 207, 209, 211, 213, 215, 217, 219, 221, 223, 225, 227, 229, 231, 233, 235, 237, 239, 241, 243, 245, 247, 249, 251, 253, 255, 257, 259, 261, 263, 265, 267, 269, 271, 273, 275, 277, 279, 281, 283, 285, 287, 289, 291, 293, 295, 297, 299, 301, 303, 305, 307, 309, 311, 313, 315, 317, 319, 321, 323, 325, 327, 329, 331, 333, 335, 337, 339, 341, 343, 345, 347, 349, 351, 353, 355, 357, 359, 361, 363, 365, 367, 369, 371, 373, 375, 377, 379, 381, 383, 385, 387, 389, 391, 393, 395, 397, 399, 401, 403, 405, 407, 409, 411, 413, 415,417, 419, 421, 423, 425, 427, 429, 431, 433, 435, 437, 439, 441, 443, 445, 447, 449, 451, 453, 455, 457, 459, 461, 463, 465, 467, 469, 471, 473, 475, 477, 479, 481, 483, 485, 487, 489, 491, 493, 495, 497, 499, 501, 503, 505, 507, 509, 511, 513, 515, 517, 519, 521, 523, 525, 527, 529, 531, 533, 535, 537, 539, 541, 543, 545, 547, 549, 551, 553, 555, 557, 559, 561, 563, 565, 567, 569, 571, 573, 575, 577, 579, or 581, wherein the recombinant polynucleotide encodes an RNA ligase.

[0276] In some embodiments, the recombinant polynucleotide comprises a polynucleotide sequence comprising nucleotide residues 34 to 1038 of an odd numbered SEQ ID NO. of SEQ ID NOs: 13-581, or a polynucleotide sequence comprising an odd numbered SEQ ID NO. of SEQ ID NOs: 13-581.

[0277] In some embodiments, the recombinant polynucleotide comprises a polynucleotide sequence comprising nucleotide residues 34 to 1038 of SEQ ID NO: 23, 25, 27, 29, 31, 33, 35, 37, 39, 41, 43, 45, 47, 49, 51, 53, 55, 57, 59, 61, 63, 65, 67, 69, 71, 73, 75, 77, 79, 81, 83, 85, 87, 89, 91, 93, 95, 97, 99, 101, 103, 105, 107, 109, 111, 113, 115, 117, 119, 121, 123, 125, 127, 129, 131, 133, 135, 137, 139, 141, 143, 145, 147, 149, 151, 153, 155, 157, 159, 161, 163, 165, 167, 169, 171, 173, 175, 177, 179, 181, 183, 185, 187, 189, 191, 193, 195, 197, 199, 201, 203, 205, 207, 209, 211, 213, 215, 217, 219, 221, 223, 225, 227, 229, 231, 233, 235, 237, 239, 241, 243, 245, 247, 249, 251, 253, 255, 257, 259, 261, 263, 265, 267, 269, 271, 273, 275, 277, 279, 281, 283, 285, 287, 289, 291, 293, 295, 297, 299, 301, 303, 305, 307, 309, 311, 313, 315, 317, 319, 321, 323, 325, 327, 329, 331, 333, 335, 337, 339, 341, 343, 345, 347, 349, 351, 353, 355, 357, 359, 361, 363, 365, 367, 369, 371, 373, 375, 377, 379, 381, 383, 385, 387, 389, 391, 393, 395, 397, 399, 401, 403, 405, 407, 409, 411, 413, 415, 417, 419, 421, 423, 425, 427, 429, 431, 433, 435, 437, 439, 441, 443, 445, 447, 449, 451, 453, 455, 457, 459, 461, 463, 465, 467, 469, 471, 473, 475, 477, 479, 481, 483, 485, 487, 489, 491, 493, 495, 497, 499, 501, 503, 505, 507, 509, 511, 513, 515, 517, 519, 521, 523, 525, 527, 529, 531, 533, 535, 537, 539, 541, 543, 545, 547, 549, 551, 553, 555, 557, 559, 561, 563, 565, 567, 569, 571, 573, 575, 577, 579, or 581.

[0278] In some embodiments, the recombinant polynucleotide comprises a polynucleotide sequence comprising SEQ ID NO: 23, 25, 27, 29, 31, 33, 35, 37, 39, 41, 43, 45, 47, 49, 51, 53, 55, 57, 59, 61, 63, 65, 67, 69, 71, 73, 75, 77, 79, 81, 83, 85, 87, 89, 91, 93, 95, 97, 99, 101, 103, 105, 107, 109, 111, 113, 115, 117, 119, 121, 123, 125, 127, 129, 131, 133, 135, 137, 139, 141, 143, 145, 147, 149, 151, 153, 155, 157, 159, 161, 163, 165, 167, 169, 171, 173, 175, 177, 179, 181, 183, 185, 187, 189, 191, 193, 195, 197, 199, 201, 203, 205, 207, 209, 211, 213, 215, 217, 219, 221, 223, 225, 227, 229, 231, 233, 235, 237, 239, 241, 243, 245, 247, 249, 251, 253, 255, 257, 259, 261, 263, 265, 267, 269, 271, 273, 275, 277, 279, 281, 283, 285, 287, 289, 291, 293, 295, 297, 299, 301, 303, 305, 307, 309, 311, 313, 315, 317, 319, 321, 323, 325, 327, 329, 331, 333, 335, 337, 339, 341, 343, 345, 347, 349, 351, 353, 355, 357, 359, 361, 363, 365, 367, 369, 371, 373, 375, 377, 379, 381, 383, 385, 387, 389, 391, 393, 395, 397, 399, 401, 403, 405, 407, 409, 411, 413, 415, 417, 419, 421, 423, 425, 427, 429, 431, 433, 435, 437, 439, 441, 443, 445, 447, 449, 451, 453, 455, 457, 459, 461, 463, 465, 467, 469, 471, 473, 475, 477, 479, 481, 483, 485, 487, 489, 491, 493, 495, 497, 499, 501, 503, 505, 507, 509, 511, 513, 515, 517, 519, 521, 523, 525, 527, 529, 531, 533, 535, 537, 539, 541, 543, 545, 547, 549, 551, 553, 555, 557, 559, 561, 563, 565, 567, 569, 571, 573, 575, 577, 579, or 581.

[0279] In some embodiments, the recombinant polynucleotide comprises a polynucleotide sequence encoding an engineered RNA ligase comprising an amino acid sequence having at least 80%, 85%, 86%, 87%, 88%, 89%, 90%, 91%, 92%, 93%, 94%, 95%, 96%, 97%, 98%, 99% or more sequence identity to the sequence corresponding to:
[0280] residues 12 to 345 of SEQ ID NO: 2;
[0281] residues 12 to 343 of SEQ ID NO: 4;
[0282] residues 12 to 250 of SEQ ID NO: 6;
[0283] residues 12 to 346 of SEQ ID NO: 8;
[0284] residues 12 to 345 of SEQ ID NO: 10;
[0285] residues 12 to 345 of SEQ ID NO: 12;
[0286] residues 12 to 346 of SEQ ID NO: 14;
[0287] residues 12 to 346 of SEQ ID NO: 16;
[0288] residues 12 to 350 of SEQ ID NO: 18;
[0289] residues 12 to 350 of SEQ ID NO: 20; or
[0290] residues 12 to 344 of SEQ ID NO: 22.

[0291] In some embodiments, the recombinant polynucleotide comprises a polynucleotide sequence encoding an engineered RNA ligase comprising an amino acid sequence having at least 80%, 85%, 86%, 87%, 88%, 89%, 90%, 91%, 92%, 93%, 94%, 95%, 96%, 97%, 98%, 99% or more sequence identity to the sequence corresponding to SEQ ID NO: 2, 4, 6, 8, 10, 12, 14, 16, 18, 20 or 22.

[0292] In some embodiments, the recombinant polynucleotide comprises a polynucleotide sequence encoding an engineered RNA ligase comprising an amino acid sequence comprising:
[0293] residues 12 to 345 of SEQ ID NO: 2;
[0294] residues 12 to 343 of SEQ ID NO: 4;
[0295] residues 12 to 250 of SEQ ID NO: 6;
[0296] residues 12 to 346 of SEQ ID NO: 8;
[0297] residues 12 to 345 of SEQ ID NO: 10;
[0298] residues 12 to 345 of SEQ ID NO: 12;
[0299] residues 12 to 346 of SEQ ID NO: 14;
[0300] residues 12 to 346 of SEQ ID NO: 16;
[0301] residues 12 to 350 of SEQ ID NO: 18;
[0302] residues 12 to 350 of SEQ ID NO: 20; or
[0303] residues 12 to 344 of SEQ ID NO: 22.

[0304] In some embodiments, the recombinant polynucleotide comprises a polynucleotide sequence encoding an engineered RNA ligase comprising an amino acid sequence comprising SEQ ID NO: 2, 4, 6, 8, 10, 12, 14, 16, 18, 20 or 22.

[0305] In some embodiments, the present disclosure provides a recombinant polynucleotide capable of hybridizing under highly stringent conditions to a reference polynucleotide encoding an engineered RNA ligase polypeptide described herein, e.g., a recombinant polynucleotide provided in Tables 5.1, 6.1, 7.1, 8.1, 9.1, 10.1, 11.1, and 12.1, or a reverse complement thereof. In some embodiments, the recombinant polynucleotide hybridizes under highly stringent conditions to a reference polynucleotide corresponding to nucleotide residues 34 to 1038 of SEQ ID NO: 13, 41, or 203, or to a reference polynucleotide sequence corresponding to SEQ ID NO: 13, 41, or 203, or a reverse complement thereof. In some embodiments, the recombinant polynucleotide hybridizes under highly stringent conditions to a polynucleotide sequence corresponding to nucleotide residues 34 to 1038 of an odd numbered SEQ ID NO. of SEQ ID NOs: 23-581, or a polynucleotide sequence comprising an odd numbered SEQ ID NO. of SEQ ID NOs: 23-581, or a reverse complement thereof.

[0306] In some embodiments, the present disclosure provides a recombinant polynucleotide capable of hybridizing under highly stringent conditions to a reverse complement of a reference polynucleotide encoding an engineered RNA ligase polypeptide described herein, wherein the recombinant polynucleotide hybridizing under stringent conditions encodes an RNA ligase polypeptide comprising an amino acid sequence having one or more amino acid differences as compared to SEQ ID NO: 14, 42, or 204, at residue positions selected from any positions as set forth in Tables 5.1, 6.1, 7.1, 8.1, 9.1, 10.1, 11.1, and 12.1. In some embodiments, the recombinant polynucleotide that hybridizes under highly stringent conditions to a reverse complement of a reference polynucleotide encoding an engineered RNA ligase polypeptide described herein encodes an RNA ligase polypeptide having one or more amino acid differences present in an engineered RNA ligase having an amino acid sequence corresponding to residues 12 to 346 of an even numbered SEQ ID NO. of SEQ ID NOs: 24-582, or an amino acid sequence comprising an even numbered SEQ ID NO. of SEQ ID NOs: 24-582, wherein the amino acid differences are relative to SEQ ID NO: 14, 42, or 204.

[0307] In some embodiments, the recombinant polynucleotide that hybridizes under highly stringent conditions comprises a polynucleotide sequence having at least 70%, 75%, 80%, 81%, 82%, 83%, 84%, 85%, 86%, 87%, 88%, 89%, 90%, 91%, 92%, 93%, 94%, 95%, 96%, 97%, 98%, 99% or more sequence identity to a reference polynucleotide sequence corresponding to nucleotide residues 34 to 1038 of SEQ ID NO: 23, 41, or 203, or to a reference polynucleotide sequence corresponding to SEQ ID NO: 23, 41, or 203, or a reverse complement thereof. In some embodiments, the recombinant polynucleotide that hybridizes under highly stringent conditions comprises a polynucleotide sequence having at least 70%, 75%, 80%, 81%, 82%, 83%, 84%, 85%, 86%, 87%, 88%, 89%, 90%, 91%, 92%, 93%, 94%, 95%, 96%, 97%, 98%, 99% or more sequence identity to a reference polynucleotide sequence corresponding to nucleotide residues 34 to 1038 of an odd-numbered SEQ ID NO. of SEQ ID NOs: 23-581, or an odd-numbered SEQ ID NO. of SEQ ID NOs: 23-581, or a reverse complement thereof.

[0308] In some additional embodiments, the polynucleotide hybridizing under highly stringent conditions comprises a polynucleotide sequence having at least 75%, 80%, 81%, 82%, 83%, 84%, 85%, 86%, 87%, 88%, 89%, 90%, 91%, 92%, 93%, 94%, 95%, 96%, 97%, 98%, 99% or more sequence identity to a reverse complement of a polynucleotide reference sequence corresponding to nucleotide residues 34 to 1038 of SEQ ID NO: 23, 41, or 203, or to a reference polynucleotide sequence corresponding to SEQ ID NO: 23, 41, or 203 encodes an engineered RNA ligase polypeptide. In some embodiments, the polynucleotide hybridizing under highly stringent conditions comprises a polynucleotide sequence having at least 75%, 80%, 81%, 82%, 83%, 84%, 85%, 86%, 87%, 88%, 89%, 90%, 91%, 92%, 93%, 94%, 95%, 96%, 97%, 98%, 99% or more sequence identity to a reverse complement of a polynucleotide reference sequence corresponding to nucleotide residues 34 to 1038 of an odd-numbered SEQ ID NO. of SEQ ID NOs: 23-581, or an odd-numbered SEQ ID NO. of SEQ ID NOs: 23-581 encodes an engineered RNA ligase polypeptide.

[0309] In some embodiments, a recombinant polynucleotide encoding any of the RNA ligases herein is manipulated in a variety of ways to facilitate expression of the RNA ligase polypeptide. In some embodiments, the recombinant polynucleotide encoding the RNA ligase comprises expression vectors where one or more control sequences is present to regulate the expression of the RNA ligase polynucleotides and/or polypeptides. Manipulation of the isolated polynucleotide prior to its insertion into a vector may be desirable or necessary depending on the expression vector utilized. Techniques for modifying polynucleotides and nucleic acid sequences utilizing recombinant DNA methods are well known in the art. In some embodiments, the control sequences include among others, promoters, leader sequences, polyadenylation sequences, propeptide sequences, signal peptide sequences, and transcription terminators.

[0310] In some embodiments, suitable promoters are selected based on the host cell selection. For bacterial host cells, suitable promoters for directing transcription of the nucleic acid constructs of the present disclosure, include, but are not limited to promoters obtained from the E. coli lac operon, Streptomyces coelicolor agarase gene (dagA), Bacillus subtilis levansucrase gene (sacB), Bacillus licheniformis alpha-amylase gene (amyL), Bacillus stearothermophilus maltogenic amylase gene (amyM), Bacillus amyloliquefaciens alpha-amylase gene (amyQ), Bacillus licheniformis penicillinase gene (penP), Bacillus subtilis xylA and xylB genes, and prokaryotic beta-lactamase gene (see, e.g., Villa-Kamaroff et al., Proc. Natl Acad. Sci. USA, 1978, 75:3727-3731), as well as the tac promoter (see, e.g., DeBoer et al., Proc. Natl Acad. Sci. USA, 1983, 80:21-25). Exemplary promoters for filamentous fungal host cells, include, but are not limited to promoters obtained from the genes for Aspergillus oryzae TAKA amylase, Rhizomucor miehei aspartic proteinase, Aspergillus niger neutral alpha-amylase, Aspergillus niger acid stable alpha-amylase, Aspergillus niger or Aspergillus awamori glucoamylase (glaA), Rhizomucor miehei lipase, Aspergillus oryzae alkaline protease, Aspergillus oryzae triose phosphate isomerase, Aspergillus nidulans acetamidase, and Fusarium oxysporum trypsin-like protease (see, e.g., WO 96/00787), as well as the NA2-tpi promoter (a hybrid of the promoters from the genes for Aspergillus niger neutral alpha-amylase and Aspergillus oryzae triose phosphate isomerase), and mutant, truncated, and hybrid promoters thereof. Exemplary yeast cell promoters can be from the genes for Saccharomyces cerevisiae enolase (ENO-1), Saccharomyces cerevisiae galactokinase (GAL1), Saccharomyces cerevisiae alcohol dehydrogenase/glyceraldehyde-3-phosphate dehydrogenase (ADH2/GAP), and Saccharomyces cerevisiae 3-phosphoglycerate kinase. Other useful promoters for yeast host cells are known in the art (see, e.g., Romanos et al., Yeast, 1992, 8:423-488). Exemplary promoters for use in insect cells include, but are not limited to, polyhedrin, p10, ELT, OpIE2, and hr5/ie1 promoters. Exemplary promoters for use in mammalian cells include, but are not limited to, those from cytomegalovirus (CMV), chicken β-actin promoter fused with the CMV enhancer, Simian vacuolating virus 40 (SV40), from Homo sapiens phosphoglycerate kinase, beta actin, elongation factor-1a or glyceraldehyde-3-phosphate dehydrogenase, and from Gallus β-actin.

[0311] In some embodiments, the control sequence is a suitable transcription terminator sequence (i.e., a sequence recognized by a host cell to terminate transcription). In some embodiments, the terminator sequence is operably linked to the 3′ terminus of the nucleic acid sequence encoding the RNA ligase polypeptide. Any suitable terminator which is functional in the host cell of choice finds use in the present invention. For bacterial expression, the transcription terminators can be a Rho-dependent terminators that rely on a Rho transcription factor, or a Rho-independent, or intrinsic terminators, which do not require a transcription factor. Exemplary bacterial transcription terminators are described in Peters et al., J Mol Biol., 2011, 412(5):793-813. Exemplary transcription terminators for filamentous fungal host cells can be obtained from the genes for Aspergillus oryzae TAKA amylase, Aspergillus niger glucoamylase, Aspergillus nidulans anthranilate synthase, Aspergillus niger alpha-glucosidase, and Fusarium oxysporum trypsin-like protease. Exemplary terminators for yeast host cells can be obtained from the genes for Saccharomyces cerevisiae enolase, Saccharomyces cerevisiae cytochrome C (CYC1), and Saccharomyces cerevisiae glyceraldehyde-3-phosphate dehydrogenase. Other useful terminators for yeast host cells are known in the art (see, e.g., Romanos et al., Yeast, 1992, 8(6):423-88). Exemplary terminators for mammalian cells include, but are not limited to those from cytomegalovirus (CMV), Simian virus 40 (SV40), from Homo sapiens growth hormone hGH, from bovine growth hormone BGH, and from human or rabbit beta globulin.

[0312] In some embodiments, the control sequence is a suitable leader sequence, a non-translated region of an mRNA that is used for translation by the host cell. In some embodiments, the leader sequence is operably linked to the 5′ terminus of the nucleic acid sequence encoding the RNA ligase polypeptide. Any suitable leader sequence that is functional in the host cell of choice find use in the present invention. Exemplary leaders for filamentous fungal host cells are obtained from the genes for Aspergillus oryzae TAKA amylase, and Aspergillus nidulans triose phosphate isomerase. Suitable leaders for yeast host cells are obtained from the genes for Saccharomyces cerevisiae enolase (ENO-1), Saccharomyces cerevisiae 3-phosphoglycerate kinase, Saccharomyces cerevisiae alpha-factor, and Saccharomyces cerevisiae alcohol dehydrogenase/glyceraldehyde-3-phosphate dehydrogenase (ADH2/GAP). Suitable leaders for mammalian host cells include but are not limited to the 5′-UTR element present in orthopoxvirus mRNA.

[0313] In some embodiments, the control sequence is a polyadenylation sequence (i.e., a sequence operably linked to the 3′ terminus of the nucleic acid sequence and which, when transcribed, is recognized by the host cell as a signal to add polyadenosine residues to transcribed mRNA). Any suitable polyadenylation sequence which is functional in the host cell of choice finds use in the present invention. Exemplary polyadenylation sequences for filamentous fungal host cells include, but are not limited to the genes for Aspergillus oryzae TAKA amylase, Aspergillus niger glucoamylase, Aspergillus nidulans anthranilate synthase, Fusarium oxysporum trypsin-like protease, and Aspergillus niger alpha-glucosidase. Useful polyadenylation sequences for yeast host cells are known (see, e.g., Guo and Sherman, Mol. Cell. Biol., 1995, 15:5983-5990). Useful polyadenylation and 3′ UTR sequences for mammalian host cells include, but are not limited to, the 3′-UTRs of α- and β-globin mRNAs that harbor several sequence elements that increase the stability and translation of mRNA.

[0314] In some embodiments, the control sequence is also a signal peptide (i.e., a coding region that codes for an amino acid sequence linked to the amino terminus of a polypeptide and directs the encoded polypeptide into the cell's secretory pathway). In some embodiments, the 5′ end of the coding sequence of the nucleic acid sequence inherently contains a signal peptide coding region naturally linked in translation reading frame with the segment of the coding region that encodes the secreted polypeptide. Alternatively, in some embodiments, the 5′ end of the coding sequence contains a signal peptide coding region that is foreign to the coding sequence. Any suitable signal peptide coding region which directs the expressed polypeptide into the secretory pathway of a host cell of choice finds use for expression of the engineered polypeptide(s). Effective signal peptide coding regions for bacterial host cells are the signal peptide coding regions include, but are not limited to those obtained from the genes for Bacillus NC1B 11837 maltogenic amylase, Bacillus stearothermophilus alpha-amylase, Bacillus licheniformis subtilisin, Bacillus licheniformis beta-lactamase, Bacillus stearothermophilus neutral proteases (nprT, nprS, nprM), and Bacillus subtilis prsA. Further signal peptides are known in the art (see, e.g., Simonen and Palva, Microbiol. Rev., 1993, 57:109-137). In some embodiments, effective signal peptide coding regions for filamentous fungal host cells include, but are not limited to the signal peptide coding regions obtained from the genes for Aspergillus oryzae TAKA amylase, Aspergillus niger neutral amylase, Aspergillus niger glucoamylase, Rhizomucor miehei aspartic proteinase, Humicola insolens cellulase, and Humicola lanuginosa lipase. Useful signal peptides for yeast host cells include, but are not limited to those from the genes for Saccharomyces cerevisiae alpha-factor and Saccharomyces cerevisiae invertase. Useful signal peptides for insect and mammalian host cells include but are not limited to, those from the genes for immunoglobulin gamma (IgG) and the signal peptide in a human secreted protein, such as human beta-galactosidase polypeptide.

[0315] In some embodiments, the control sequence is a propeptide coding region that codes for an amino acid sequence positioned at the amino terminus of a polypeptide. The resultant polypeptide is referred to as a “proenzyme,” “propolypeptide,” or “zymogen.” A propolypeptide can be converted to a mature active polypeptide by catalytic or autocatalytic cleavage of the propeptide from the propolypeptide. The propeptide coding region may be obtained from any suitable source, including, but not limited to the genes for Bacillus subtilis alkaline protease (aprE), Bacillus subtilis neutral protease (nprT), Saccharomyces cerevisiae alpha-factor, Rhizomucor miehei aspartic proteinase, and Myceliophthora thermophila lactase (see, e.g., WO 95/33836). Where both signal peptide and propeptide regions are present at the amino terminus of a polypeptide, the propeptide region is positioned next to the amino terminus of a polypeptide and the signal peptide region is positioned next to the amino terminus of the propeptide region.

[0316] In some embodiments, regulatory sequences are also utilized. These sequences facilitate the regulation of the expression of the polypeptide relative to the growth of the host cell. Examples of regulatory systems are those that cause the expression of the gene to be turned on or off in response to a chemical or physical stimulus, including the presence of a regulatory compound. In prokaryotic host cells, suitable regulatory sequences include, but are not limited to the lac, tac, and trp operator systems. In yeast host cells, suitable regulatory systems include, but are not limited to the ADH2 system or GAL1 system. In filamentous fungi, suitable regulatory sequences include, but are not limited to the TAKA alpha-amylase promoter, Aspergillus niger glucoamylase promoter, and Aspergillus oryzae glucoamylase promoter.

[0317] In another aspect, the present disclosure provides a recombinant expression vector comprising a recombinant polynucleotide encoding an engineered RNA ligase polypeptide, and one or more expression regulating regions such as a promoter and a terminator, a replication origin, etc., depending on the type of hosts into which they are to be introduced. In some embodiments, the various nucleic acid and control sequences described herein are joined together (i.e., operably linked) to produce recombinant expression vectors which include one or more convenient restriction sites to allow for insertion or substitution of the nucleic acid sequence encoding the RNA ligase polypeptide at such sites. Alternatively, in some embodiments, the nucleic acid sequence of the present disclosure is expressed by inserting the nucleic acid sequence or a nucleic acid construct comprising the sequence into an appropriate vector for expression. In some embodiments involving the creation of the expression vector, the coding sequence is located in the vector so that the coding sequence is operably linked with the appropriate control sequences for expression.

[0318] The recombinant expression vector may be any suitable vector (e.g., a plasmid or virus), that can be conveniently subjected to recombinant DNA procedures and bring about the expression of the RNA ligase polynucleotide sequence. The choice of the vector typically depends on the compatibility of the vector with the host cell into which the vector is to be introduced. The vectors may be linear or closed circular plasmids.

[0319] In some embodiments, the expression vector is an autonomously replicating vector (i.e., a vector that exists as an extra-chromosomal entity, the replication of which is independent of chromosomal replication, such as a plasmid, an extra-chromosomal element, a minichromosome, or an artificial chromosome). The vector may contain any means for assuring self-replication. In some alternative embodiments, the vector is one in which, when introduced into the host cell, it is integrated into the genome and replicated together with the chromosome(s) into which it has been integrated. Furthermore, in some embodiments, a single vector or plasmid, or two or more vectors or plasmids which together contain the total DNA to be introduced into the genome of the host cell, and/or a transposon is utilized.

[0320] In some embodiment, the recombinant polynucleotides may be provided on a non-replicating expression vector or plasmid. In some embodiments, the non-replicating expression vector or plasmid can be based on viral vectors defective in replication (see, e.g., Travieso et al., npj Vaccines, 2022, Vol. 7, Article 75).

[0321] In some embodiments, the expression vector contains one or more selectable markers, which permit selection of transformed cells. A “selectable marker” is a gene, the product of which provides for biocide or viral resistance, resistance to heavy metals, prototrophy to auxotrophs, and the like. Examples of bacterial selectable markers include, but are not limited to the dal genes from Bacillus subtilis or Bacillus licheniformis, or markers, which confer antibiotic resistance such as ampicillin, kanamycin, chloramphenicol or tetracycline resistance. Suitable markers for yeast host cells include, but are not limited to ADE2, HIS3, LEU2, LYS2, MET3, TRP1, and URA3. Selectable markers for use in filamentous fungal host cells include, but are not limited to, amdS (acetamidase; e.g., from A. nidulans or A. orzyae), argB (ornithine carbamoyltransferases), bar (phosphinothricin acetyltransferase; e.g., from S. hygroscopicus), hph (hygromycin phosphotransferase), niaD (nitrate reductase), pyrG (orotidine-5′-phosphate decarboxylase; e.g., from A. nidulans or A. orzyae), sC (sulfate adenyltransferase), and trpC (anthranilate synthase), as well as equivalents thereof.

[0322] In another aspect, the present disclosure provides a host cell comprising a recombinant polynucleotide encoding at least one engineered RNA ligase polypeptide described herein, the polynucleotide(s) being operably linked to one or more control sequences for expression of the engineered RNA ligase enzyme(s) in the host cell. In some embodiments, the host cell comprises an expression vector comprising a polynucleotide encoding an engineered RNA ligase polypeptide described herein, where the polynucleotide is operably linked to one or more control sequences. Host cells suitable for use in expressing the polypeptides encoded by the expression vectors of the present invention are known in the art and include but are not limited to, bacterial cells, such as E. coli, B. subtilis, Vibrio fluvialis, Streptomyces and Salmonella typhimurium cells; fungal cells, such as yeast cells (e.g., Saccharomyces cerevisiae or Pichia pastoris (ATCC Accession No. 201178)); insect cells such as Drosophila S2 and Spodoptera Sf9 cells; animal cells such as CHO, COS, BHK, 293, and Bowes melanoma cells; and plant cells. Exemplary host cells also include various Escherichia coli strains (e.g., W3110 (ΔfhuA) and BL21).

[0323] In another aspect, the present disclosure provides a method of producing the engineered RNA ligase polypeptides, where the method comprises culturing a host cell capable of expressing a polynucleotide encoding the engineered RNA ligase polypeptide under conditions suitable for expression of the polypeptide such that the engineered RNA ligase is produced. In some embodiments, the method further comprises the step(s) of isolating the RNA ligase polypeptides from the culture and/or host cells.

[0324] In some embodiments, the method further comprises purifying the expressed RNA ligase polypeptide, as described herein.

[0325] In some embodiments, the RNA ligase polypeptide expressed in a host cell is recovered from the cells and/or the culture medium using any one or more of the known techniques for protein purification, including, among others, lysozyme or detergent treatment, sonication, filtration, salting-out, ultra-centrifugation, and chromatography, such as described herein.

[0326] Chromatographic techniques for isolation/purification of the RNA ligase polypeptides include, among others, reverse phase chromatography, high-performance liquid chromatography, ion-exchange chromatography, hydrophobic-interaction chromatography, size-exclusion chromatography, gel electrophoresis, and affinity chromatography. Conditions for purifying the RNA ligase depends, in part, on factors such as net charge, hydrophobicity, hydrophilicity, molecular weight, molecular shape, etc., and will be apparent to those having skill in the art. In some embodiments, affinity techniques may be used to isolate the RNA ligase. For affinity chromatography purification, an antibody that specifically binds RNA ligase polypeptide may be used. In some embodiments, an affinity tag, e.g., His-tag, can be introduced into the RNA ligase polypeptide for purposes of isolation/purification.

[0327] Appropriate culture media and growth conditions for host cells are known in the art. It is contemplated that any suitable method for introducing polynucleotides for expression of the RNA ligase polypeptides into cells will find use in the present invention. Suitable techniques include, but are not limited to electroporation, biolistic particle bombardment, liposome mediated transfection, calcium chloride transfection, and protoplast fusion.

[0328] In some embodiments, recombinant polypeptides (e.g., RNA ligase enzyme variants) can be produced using any suitable methods known the art. For example, there is a wide variety of different mutagenesis techniques known to those skilled in the art. In addition, mutagenesis kits are also available from many commercial molecular biology suppliers. Methods are available to make specific substitutions at defined amino acids (site-directed), specific or random mutations in a localized region of the gene (region-specific), or random mutagenesis over the entire gene (e.g., saturation mutagenesis). Numerous suitable methods are known to those in the art to generate enzyme variants, including but not limited to site-directed mutagenesis of single-stranded DNA or double-stranded DNA using PCR, cassette mutagenesis, gene synthesis, error-prone PCR, shuffling, and chemical saturation mutagenesis, or any other suitable method known in the art. Non-limiting examples of methods used for DNA and protein engineering are provided in the following patents: U.S. Pat. Nos. 6,117,679; 6,420,175; 6,376,246; 6,586,182; 7,747,391; 7,747,393; 7,783,428; and 8,383,346. After the variants are produced, they can be screened for any desired property (e.g., high or increased activity, or low or reduced activity, increased thermal activity, increased stability, increased substrate range, increased inhibitor resistance or tolerance, increased salt tolerance, and/or pH stability, etc.). Exemplary methods are provided in the Examples.

[0329] In some embodiments, the engineered RNA ligase polypeptides with the properties disclosed herein can be obtained by subjecting the polynucleotide encoding the naturally occurring or engineered RNA ligase polypeptide to a suitable mutagenesis and/or directed evolution methods known in the art, for example, as described herein. An exemplary directed evolution technique is mutagenesis and/or DNA shuffling (see, e.g., Stemmer, Proc. Natl. Acad. Sci. USA, 1994, 91:10747-10751; WO 95/22625; WO 97/0078; WO 97/35966; WO 98/27230; WO 00/42651; WO 01/75767 and U.S. Pat. No. 6,537,746). Other directed evolution procedures that can be used include, among others, staggered extension process (StEP), in vitro recombination (see, e.g., Zhao et al., Nat. Biotechnol., 1998, 16:258-261), mutagenic PCR (see, e.g., Caldwell et al., PCR Methods Appl., 1994, 3:S136-S140), and cassette mutagenesis (see, e.g., Black et al., Proc. Natl. Acad. Sci. USA, 1996, 93:3525-3529).

[0330] Mutagenesis and directed evolution methods can be applied to RNA ligase-encoding polynucleotides to generate variant libraries that can be expressed, screened, and assayed. Any suitable mutagenesis and directed evolution methods find use in the present disclosure and are known in the art (see, e.g., U.S. Pat. Nos. 5,605,793, 5,811,238, 5,830,721, 5,834,252, 5,837,458, 5,928,905, 6,096,548, 6,117,679, 6,132,970, 6,165,793, 6,180,406, 6,251,674, 6,265,201, 6,277,638, 6,287,861, 6,287,862, 6,291,242, 6,297,053, 6,303,344, 6,309,883, 6,319,713, 6,319,714, 6,323,030, 6,326,204, 6,335,160, 6,335,198, 6,344,356, 6,352,859, 6,355,484, 6,358,740, 6,358,742, 6,365,377, 6,365,408, 6,368,861, 6,372,497, 6,337,186, 6,376,246, 6,379,964, 6,387,702, 6,391,552, 6,391,640, 6,395,547, 6,406,855, 6,406,910, 6,413,745, 6,413,774, 6,420,175, 6,423,542, 6,426,224, 6,436,675, 6,444,468, 6,455,253, 6,479,652, 6,482,647, 6,483,011, 6,484,105, 6,489,146, 6,500,617, 6,500,639, 6,506,602, 6,506,603, 6,518,065, 6,519,065, 6,521,453, 6,528,311, 6,537,746, 6,573,098, 6,576,467, 6,579,678, 6,586,182, 6,602,986, 6,605,430, 6,613,514, 6,653,072, 6,686,515, 6,703,240, 6,716,631, 6,825,001, 6,902,922, 6,917,882, 6,946,296, 6,961,664, 6,995,017, 7,024,312, 7,058,515, 7,105,297, 7,148,054, 7,220,566, 7,288,375, 7,384,387, 7,421,347, 7,430,477, 7,462,469, 7,534,564, 7,620,500, 7,620,502, 7,629,170, 7,702,464, 7,747,391, 7,747,393, 7,751,986, 7,776,598, 7,783,428, 7,795,030, 7,853,410, 7,868,138, 7,783,428, 7,873,477, 7,873,499, 7,904,249, 7,957,912, 7,981,614, 8,014,961, 8,029,988, 8,048,674, 8,058,001, 8,076,138, 8,108,150, 8,170,806, 8,224,580, 8,377,681, 8,383,346, 8,457,903, 8,504,498, 8,589,085, 8,762,066, 8,768,871, 9,593,326, 9,665,694, 9,684,771, and all related PCT and non-US counterparts; Ling et al., Anal. Biochem., 1997, 254(2):157-78; Dale et al., Meth. Mol. Biol., 1996, 57:369-74; Smith, Ann. Rev. Genet., 1985, 19:423-462; Botstein et al., Science, 1985, 229:1193-1201; Carter, Biochem. J., 1986, 237:1-7; Kramer et al., Cell, 1984, 38:879-887; Wells et al., Gene, 1985, 34:315-323; Minshull et al., Curr. Op. Chem. Biol., 1999, 3:284-290; Christians et al., Nat. Biotechnol., 1999, 17:259-264; Crameri et al., Nature, 1998, 391:288-291; Crameri, et al., Nat. Biotechnol., 1997, 15:436-438; Zhang et al., Proc. Nat. Acad. Sci. U.S.A., 1997, 94:4504-4509; Crameri et al., Nat. Biotechnol., 1996, 14:315-319; Stemmer, Nature, 1994, 366:389-391; Stemmer, Proc. Nat. Acad. Sci. USA, 1994, 91:10747-10751; EP 3 049 973; WO 95/22625; WO 97/0078; WO 97/35966; WO 98/27230; WO 00/42651; WO 01/75767; WO 2009/152336; and WO 2015/048573, all of which are incorporated herein by reference).

[0331] In some embodiments, the clones obtained following mutagenesis treatment are screened by subjecting the enzyme preparations to a defined treatment conditions or assay conditions (e.g., temperature, pH, type of ligase substrate (e.g., DNA, RNA, secondary structure, etc.), input substrate concentration, nucleotide cofactors, etc.) and measuring enzyme activity after the treatments or other suitable assay conditions. Clones containing a polynucleotide encoding the polypeptide of interest are then isolated from the gene, sequenced to identify the nucleotide sequence changes (if any), and used to express the enzyme in a host cell. Measuring enzyme activity from the expression libraries can be performed using any suitable method known in the art and as described in the Examples.

[0332] In some embodiments, for engineered polypeptides of known sequence, the polynucleotides encoding the enzyme can be prepared by standard solid-phase methods, according to known synthetic methods. In some embodiments, fragments of up to about 100 bases can be individually synthesized, then joined (e.g., by enzymatic or chemical ligation methods, or polymerase mediated methods) to form any desired continuous sequence (see, e.g., Hughes et al., Cold Spring Harb Perspect Biol. 2017 January; 9(1):a023812). For example, polynucleotides and oligonucleotides disclosed herein can be prepared by chemical synthesis using the classical phosphoramidite method (see, e.g., Beaucage et al., Tet. Lett., 1981, 22:1859-69; and Matthes et al., EMBO J., 1984, 3:801-05), as it is typically practiced in automated synthetic methods. According to the phosphoramidite method, oligonucleotides are synthesized (e.g., in an automatic DNA synthesizer), purified, annealed, ligated and cloned in appropriate vectors.

[0333] In some embodiments, a method for preparing the engineered RNA ligase polypeptide can comprise: (a) synthesizing a polynucleotide encoding a polypeptide comprising an amino acid sequence selected from the amino acid sequence of any variant as described herein, and (b) expressing the RNA ligase polypeptide encoded by the polynucleotide. In some embodiments of the method, the amino acid sequence encoded by the polynucleotide can optionally have one or several (e.g., up to 3, 4, 5, or up to 10) amino acid residue deletions, insertions and/or substitutions. In some embodiments, the amino acid sequence has optionally 1-2, 1-3, 1-4, 1-5, 1-6, 1-7, 1-8, 1-9, 1-10, 1-15, 1-20, 1-21, 1-22, 1-23, 1-24, 1-25, 1-30, 1-35, 1-40, 1-45, or 1-50 amino acid residue deletions, insertions and/or substitutions. In some embodiments, the amino acid sequence has optionally 1, 2, 3, 4, 5, 6, 7, 8, 9, 10, 11, 12, 13, 14, 15, 16, 17, 18, 19, 20, 21, 22, 23, 24, 25, 30, 30, 35, 40, 45, or 50 amino acid residue deletions, insertions and/or substitutions. In some embodiments, the amino acid sequence has optionally 1, 2, 3, 4, 5, 6, 7, 8, 9, 10, 11, 12, 13, 14, 15, 16, 18, 20, 21, 22, 23, 24, or 25 amino acid residue deletions, insertions and/or substitutions. In some embodiments, the substitutions are conservative or non-conservative substitutions.

[0334] In some embodiments, any of the engineered RNA ligase polypeptides expressed in a host cell are recovered and/or purified from the cells and/or the culture medium using any one or more of the known techniques for protein purification, including, among others, lysozyme treatment, sonication, filtration, salting-out, ultra-centrifugation, and chromatography, as described herein.

### Composition of RNA Ligases

[0335] In a further aspect, the present disclosure provides compositions of the RNA ligases disclosed herein. In some embodiments, the composition comprises at least one engineered RNA ligase polypeptide described herein. In some embodiments, the engineered RNA ligase polypeptide in the compositions is isolated or purified. In some embodiments, the RNA ligase is combined with other components and compounds to provide compositions and formulations comprising the engineered RNA ligase polypeptide as appropriate for different applications and uses.

[0336] In some embodiments, the composition comprises at least one engineered RNA ligase described herein. For example, a composition comprises at least one engineered RNA ligase provided in Tables 4.1, 5.1, 6.1, 7.1, 8.1, 9.1, 10.1, 11.1, and 12.1.

[0337] In some embodiments, the composition comprises an RNA ligase provided in Table 4.1. In some embodiments, the composition comprises an RNA ligase comprising an amino acid sequence comprising: 12 to 345 of SEQ ID NO: 2; residues 12 to 343 of SEQ ID NO: 4; residues 12 to 250 of SEQ ID NO: 6; residues 12 to 346 of SEQ ID NO: 8; residues 12 to 345 of SEQ ID NO: 10; residues 12 to 345 of SEQ ID NO: 12; residues 12 to 346 of SEQ ID NO: 14; residues 12 to 346 of SEQ ID NO: 16; residues 12 to 350 of SEQ ID NO: 18; residues 12 to 350 of SEQ ID NO: 20; or residues 12 to 344 of SEQ ID NO: 22. In some embodiments, the composition comprises an RNA ligase comprising an amino acid sequence comprising SEQ ID NO: 2, 4, 6, 8, 10, 12, 14, 16, 18, 20 or 22.

[0338] In some embodiments, the composition further comprises one or more of a buffer, a nucleotide substrate (e.g., ATP or dATP), and/or at least one or more polynucleotide substrates, for example a polynucleotide substrate with modified nucleotides.

[0339] In some embodiments, the composition further comprises an additive or ligation enhancing agent, including one or more of polyethylene glycol (e.g., PEG 6000, PEG 8000, etc.) or other molecular crowding reagents, including, among others, bovine serum albumin, Ficoll, and dextran (e.g., Dextran 6000).

[0340] In some embodiments, an engineered RNA ligase described herein is provided in solution, as a lyophilizate, or is immobilized on a substrate. In some embodiments, the substrate is a solid substrate, porous substrate, membrane, or particles. The enzyme can be entrapped in matrixes or membranes. In some embodiments, matrices include polymeric materials such as calcium-alginate, agar, k-carrageenin, polyacrylamide, agarose or derivatives thereof (e.g., cross-linked agarose), and collagen, or solid matrices, such as activated carbon, porous ceramic, and diatomaceous earth. In some embodiments, the matrix is a particle, a membrane, or a fiber. Types of membranes include, among others, nylon, cellulose, polysulfone, or polyacrylate.

[0341] In some embodiments, the enzyme is immobilized on the surface of a support material. In some embodiments, the enzyme is adsorbed on the support material. In some embodiments, the enzyme is immobilized on the support material by covalent attachment. Support materials include, among others, inorganic materials, such as alumina, silica, porous glass, ceramics, diatomaceous earth, clay, and bentonite, or organic materials, such as cellulose (CMC, DEAE-cellulose), starch, activated carbon, polyacrylamide, polystyrene, and ion-exchange resins, such as Amberlite, Sephadex, and Dowex.

Uses of Engineered RNA ligase Polypeptides and Kits

[0342] In another aspect, the present disclosure provides uses of the engineered RNA ligases for polynucleotide synthesis, RNA repair, or other molecular biological uses.

[0343] In some embodiments, the engineered RNA ligase is used for ligating polynucleotides and oligonucleotides. In some embodiments, the engineered RNA ligase is used for synthesizing polynucleotides from shorter oligonucleotides. In some embodiments, a method of ligating at least a first polynucleotide strand and a second polynucleotide strand comprises contacting a first polynucleotide strand and a second polynucleotide strand with an engineered RNA ligase described herein in presence of a nucleotide substrate under conditions suitable for ligation of the first polynucleotide strand to the second polynucleotide strand, wherein the first polynucleotide strand comprises a ligatable 5′-end and the second polynucleotide strand comprises a 3′-end ligatable to the 5′-end of the first polynucleotide strand.

[0344] In some embodiments, the second polynucleotide strand comprising a ligatable 3′-end has at least 2, 3, 4, 5 or 6 ribonucleotides at the 3′ terminal end. In some embodiments of the method, the 3′-end of the second polynucleotide strand is a 3′-OH. In some embodiments of the method, the 5′-end of the first polynucleotide strand is a 5′-phosphate. In some embodiments of the method, the internucleotide linkage contained in the first polynucleotide strand and/or second polynucleotide strand comprises a phosphate linkage.

[0345] In some embodiments, the method further comprises a third polynucleotide strand, wherein the first polynucleotide strand and second polynucleotide strand hybridize adjacent to one another on the third polynucleotide strand to position the 5′-end of the first polynucleotide strand adjacent to the 3′-end of the second polynucleotide strand, e.g., to form a nick. In some embodiments of the method, the third polynucleotide strand is continuous with the first polynucleotide strand or second polynucleotide strand.

[0346] In some embodiments of the method, the third polynucleotide strand is continuous with the first polynucleotide strand and second polynucleotide strand to form a single continuous polynucleotide ligase substrate. In some embodiments, the third polynucleotide strand is RNA, DNA, or a mixture of RNA and DNA.

[0347] In some embodiments of the method, the third polynucleotide comprises a splint or bridging polynucleotide, wherein the 5′-terminal sequence of the first polynucleotide strand and the 3′-terminal sequence of the second polynucleotide strand hybridize adjacent to one another on the splint or bridging polynucleotide to position the 5′-end of the first polynucleotide strand adjacent to the 3′-end of the second polynucleotide strand. In some embodiments, the splint or bridging polynucleotide is RNA, DNA, or a mixture of RNA and DNA.

[0348] In some embodiments, the first polynucleotide strand is hybridized to the third polynucleotide strand to form a first double stranded fragment, and the second polynucleotide strand is hybridized to a fourth polynucleotide strand to form a second double stranded fragment, where the first and second double stranded fragments can base pair to form a substrate for the engineered RNA ligase. In some embodiments, the first double stranded fragment and the second double stranded fragment have complementary overhangs or complementary single stranded ends, also referred to as cohesive or sticky ends, that can base pair and form double stranded nick(s) between the first and second double stranded fragments that serve as a substrate for the engineered RNA ligase.

[0349] In some embodiments, the complementary ends (e.g., sticky or cohesive ends) are of sufficient length for the double stranded fragments to base pair and form suitable substrates for the engineered RNA ligase. In some embodiments, the complementary single stranded end comprises at least 1-50, 2-40, 3-35, 4-30, 5-25, 6-20, or 8-15 or more nucleotides in length. In some embodiments, the complementary single stranded end is from 1-10, 2-8, or 4-6 nucleotides in length. In some embodiments, the complementary single stranded end is 1, 2, 3, 4, 5, 6, 8, 10, 12, 14, 16, 18, 20, or more nucleotides in length.

[0350] In some embodiments, the double stranded region or complementary portion of each of the double stranded fragment is from 4-50, 6-45, 8-40, 10-35, 12-30, or 14-25 nucleotides in length. In some embodiments, the double stranded region is at least 4, 5, 6, 7, 8, 9, 10, 12, 14, 16, 18, 20, 22, 24, 26, 28, 30, 35, 40, 45, or 50 nucleotides in length.

[0351] In some embodiments of the method, the ligase substrates comprise at least 2, 3, 4, 5, or 6 or more double stranded fragments, where each double stranded fragment has a complementary end that can base pair with at least one other double stranded fragment with a complementary end to form substrates for the RNA ligase. In some embodiments, the double stranded fragments have complementary or cohesive ends, e.g., at the 5′ and 3′ ends, such that the double stranded fragments can be ligated to form concatemers. In some embodiments, where the number of double stranded fragments is 3, at least one of the double stranded fragments has complementary ends at the 5′ and 3′ ends of the fragment, where double stranded fragment base pairs with two other different double stranded fragments to form a substrate that can be ligated to a product containing the three double stranded fragments. It is to be understood that where 3 or more double stranded fragments are ligated, the complementary ends of the double stranded fragments can be designed for ligation of all of the different double stranded fragments.

[0352] In some embodiments of the method, the first polynucleotide strand and/or second polynucleotide strand comprise one or more modified nucleotides or nucleotide analogs, wherein the modified nucleotide or nucleotide analog comprises a nucleobase analog or modified nucleobase, modified nucleoside sugar residue, modified internucleotide linkage, modified 5′-end phosphate group, and/or modified 3′-end hydroxyl group.

[0353] In some embodiments, the polynucleotide substrate comprises a modified 5′-end phosphate group, wherein the modified phosphate group is a phosphate analog. In some embodiments of the method, the first polynucleotide comprises a 5′-phosphate analog. In some embodiments, the 5′-phosphate analog is a phosphorothioate, phosphoramidate, monomethylphosphate, methylphosphonate, vinylphosphonate, or phosphonocarboxylate.

[0354] In some embodiments of the method, the polynucleotide substrate comprises one or more modified nucleoside sugar residues. In some embodiments of the method, the first polynucleotide and/or second polynucleotide comprises one or more modified nucleoside sugar residues. In some embodiments, the modified nucleoside sugar residue is a 2′-O-alkyl, a 2′-halo, a 3-D-ribo LNA, or a α-L-ribo-LNA (e.g., locked nucleic acids). In some embodiments, the modified nucleoside sugar residue is, among others, a 2′-O-methyl, 2′-O-ethyl, or 2′-O-propyl group. In some embodiments, the modified nucleoside sugar residue is 2′-fluoro, 2′-bromo, or 2′-chloro, preferably 2′-fluoro. In some embodiments, the sugar residue is modified with a conjugate, such as a targeting moiety, for example, GalNAc or lipid moieties.

[0355] In some embodiments of the method, the polynucleotide substrate comprises one or more modified nucleotide residues having a modified nucleobase or nucleobase analog. In some embodiments of the method, the first polynucleotide and/or second polynucleotide comprises one or more modified nucleotide residues having a modified nucleobase or nucleobase analog. In some embodiments, the nucleobase analog is, among others, xanthine, hypoxanthine, inosine, 6-methyladenine, 7-methylguanine, 2,6-diaminopurine, 5-methylcytosine, 5-hydroxycytosine, 5-bromocytosine, 5-iodocytosine, 2-thiothymine, 5-fluorouracil, 5-bromouracil, 8-bromoguanine, 8-aminoguanine, or 8-aza-7-deazaguanine. In some embodiments, the nucleobase is modified with a conjugate, such as a targeting moiety, for example, GalNAc and lipid moieties.

[0356] In some embodiments of the method, the polynucleotide substrate comprises one or more modified or non-standard internucleotide linkages, i.e., internucleotide linkages other than phosphate linkages. In some embodiments, the first polynucleotide and/or second polynucleotide comprises one or more modified or non-standard internucleotide linkages. In some embodiments, the internucleotide linkage is a phosphorothioate, phosphoacetate, phosphoramidate, methylphosphonate, or phosphonocarboxylate. In some embodiments, at least 1%, 2%, 5%, 10%, or more of the internucleotide linkages are non-standard internucleotide linkages. In some embodiments, the non-standard internucleotide linkages are present 1, 2, 3, 4 or 5 nucleotides of the 5′ and/or 3′-terminus of the polynucleotide substrates.

[0357] In some embodiments of the method, the polynucleotide substrate comprises modified 3′-hydroxyl group. In some embodiments, 3′-end of a polynucleotide substrate is attached to a matrix or surface, such as a solid matrix. In such instances, the polynucleotide substrate attached to a matrix has a ligatable 5′-end. In some embodiments, the 3′-end of a polynucleotide substrate is modified with an amine, halo, phosphate, phosphate analog, —O-alkyl, lipid moiety, or a detectable label.

[0358] In some embodiments, the polynucleotide substrate comprises C-4′ modifications, including among others, 4′-thio-C2′ modifications, 4′/5′ aminoalkyl/C2′ modifications, C4′-Guanidino-C2′-modifications, and C4′-O-Me/C2′-modifications (see, e.g., Gangopadhyay et al., RNA Biology, 2022, 19:1, 452-467.

[0359] In some embodiments, the method includes a nucleotide substrate used by the RNA ligase to catalyze the joining reaction. In some embodiments, the nucleotide substrate is ATP and/or dATP.

[0360] Preferably, the nucleotide substrate is ATP. In some embodiments, the reaction conditions for the ligation include additional components, such as Mg⁺², buffer, and/or salts.

[0361] In some embodiments, the reaction conditions also include a ligation enhancing reagent, including, among others, polyethylene glycol (e.g., PEG 6000 and PEG 8000) or other molecular crowding reagents, for example bovine serum albumin (BSA), dextran, and Ficoll.

[0362] In some embodiments, ligation reaction is carried out at a suitable temperature and reaction time period. In some embodiments, the ligation reaction temperature is from about 2° C. to about 60° C. In some embodiments, the ligation reaction temperature is from 4° C. to 55° C., 4° C. to 50° C., 4° C. to 45° C., or 10° C. to 40° C. In some embodiments, the ligation reaction temperature is 2° C., 5° C., 10° C., 15° C., 20° C., 25° C., 30° C., 37° C., 40° C., 45° C., 50° C., 55° C., or 60° C. In some embodiments, the ligation reaction temperature can use different temperatures, for example a temperature at which stable hybrids are formed between polynucleotide substrate(s) followed by a higher temperature to promote completion of ligation reaction.

[0363] In some embodiments, the ligation reaction time can be a sufficient time for ligation of polynucleotide substrate(s). In some embodiments, the ligation reaction time is from 0.5-72 hr or longer.

[0364] In some embodiments, the ligation reaction time is 1-72 hr, 2-48 hr, or 2-24 hr. In some embodiments, the ligation reaction time is 0.5, 1, 2, 4, 5, 12, 24, 48, or 72 hr or longer.

[0365] In some embodiments, the engineered RNA ligase is used to ligate nicks or related nick structures (see, e.g., Cheng et al., Royal Soc Chem Adv., 2019, 9:8620-8627). In some embodiments, the engineered RNA ligase is used to synthesize RNAs from shorter oligonucleotides, for example by use of splint nucleic acids (see, e.g., Stark et al., RNA, 2006, 12:2014-2019). In some embodiments, the engineered RNA ligase is used to ligate modified oligonucleotides, such as provided in the Examples. Other examples of modified oligonucleotide products that can be synthesized using short oligonucleotide substrates, include, among others, shRNAs or siRNAs described in patent publications WO22104366, WO22029209, WO22031847, WO20226960, US2022072024, US2021238606, U.S. Ser. No. 11/286,488, US2017305956, WO22212153, WO22192519, WO22125490, WO22072447, WO21257568, WO21102373, WO21072395, WO21022108, US2022079971, U.S. Ser. No. 11/034,957, US2021332365, U.S. Ser. No. 11/015,201, U.S. Ser. No. 10/995,336, U.S. Ser. No. 11/091,759, U.S. Ser. No. 10/889,813, U.S. Ser. No. 10/130,651, U.S. Ser. No. 10/513,703, WO19232255, WO21108640, WO22147304, and WO21138537.

[0366] In a further aspect, the present disclosure provides a kit comprising an engineered RNA ligase described herein. In some embodiments, the kit further comprises one or more of a buffer, a nucleotide substrate (e.g., ATP or dATP), and/or one or more polynucleotide substrates. In some embodiments, the kit further comprises an additive or ligation enhancing agent, including one or more of polyethylene glycol (e.g., PEG 6000, PEG 8000, etc.) or other molecular crowding reagents, including, among others, bovine serum albumin, Ficoll, and dextran (e.g., Dextran 6000).

### EXAMPLES

[0367] The following Examples, including experiments and results achieved, are provided for illustrative purposes only and are not to be construed as limiting the present invention.

[0368] In the experimental disclosure below, the following abbreviations where relevant apply: ppm (parts per million); M (molar); mM (millimolar), uM and μM (micromolar); nM (nanomolar); mol (moles); gm and g (gram); mg (milligrams); ug and μg (micrograms); L and 1 (liter); ml and mL (milliliter); ul, uL, μl, and μL (microliter); cm (centimeters); mm (millimeters); um and μm (micrometers); sec. (seconds); min(s) (minute(s)); h(s) and hr(s) (hour(s)); U (units); OD (optical density); MW (molecular weight); rpm (rotations per minute); rcf (relative centrifugal force); psi and PSI (pounds per square inch); ° C. (degrees Celsius); RT and rt (room temperature); NGS (next-generation sequencing); ds (double stranded); ss (single stranded); CDS (coding sequence); DNA (deoxyribonucleic acid); RNA (ribonucleic acid); E. coli W3110 (commonly used laboratory E. coli strain, available from the Coli Genetic Stock Center [CGSC], New Haven, CT); HTP (high throughput); HPLC (high pressure liquid chromatography); FPLC (fast protein liquid chromatography); ddH2O (double distilled water); PBS (phosphate buffered saline); BSA (bovine serum albumin); DTT (dithiothreitol); CAM (chloramphenicol); CAT (chloramphenicol acetyltransferase); IPTG (isopropyl β-D-1-thiogalactopyranoside); FIOPC (fold improvements over positive control); FIOP (fold improvements over parent); LB (Luria-Bertani); TB (Terrific-Broth).

### Example 1

[0369] E. coli Expression Hosts Containing Recombinant RNA Ligase 2 (Rnl2) Genes

[0370] To produce enzyme, RNA ligase 2 genes were cloned in either of two different expression vectors. For Examples 3-6, pCK110900 (see, e.g., FIG. 3 of US Pat. Appln. Publn. No. 2006/0195947) operably linked to the lac promoter under control of the lac1 repressor was used. The expression vector also contains the P15a origin of replication and the chloramphenicol resistance gene. Example 7-13 used the pJV vector system (see U.S. patent Ser. No. 10/184,117). The resulting plasmids were transformed into E. coli W3110, using standard methods known in the art. The transformants were isolated by subjecting the cells to chloramphenicol selection, as known in the art (see e.g., U.S. Pat. No. 8,383,346 and WO2010/144103).

### Example 2

### Preparation of RNA Ligase (Rnl2)-Containing Wet Cell Pellets

[0371] E. coli. cells containing recombinant Rnl2-encoding genes from monoclonal colonies were inoculated into 180 μl LB containing 1% glucose and 30 μg/mL chloramphenicol (CAM) in the wells of 96-well, shallow-well microtiter plates. The plates were sealed with O₂-permeable seals, and cultures were grown overnight at 30° C., 200 rpm, and 85% humidity. Then, 10 μl of each of the cell cultures were transferred into the wells of 96-well, deep-well plates containing 390 mL TB and 30 μg/mL CAM. The deep-well plates were sealed with O₂-permeable seals and incubated at 30° C., 250 rpm, and 85% humidity until OD600 0.6-0.8 was reached. The cell cultures were then induced by IPTG to a final concentration of 1 mM and incubated overnight under the same conditions as originally used. The cells were then pelleted using centrifugation at 4,000 rpm for 10 min. The supernatants were discarded, and the pellets were frozen at −80° C. prior to lysis.

### Example 3

[0372] E. coli Shake Flake Expression and Purification of Recombinant RNA Ligase 2 (Rnl2) Genes

[0373] To determine the first round backbone, a set of ten ligase enzymes were selected based on their homology to SEQ ID NO: 2. HTP cultures grown as described above were plated onto LB agar plates with 1% glucose and 30 μg/ml chloramphenicol and grown overnight at 37° C. A single colony from each culture was transferred to 6 ml of LB broth with 1% glucose and 30 μg/ml chloramphenicol. The cultures were grown for 18 h at 30° C., 250 rpm, and subcultured at a dilution of approximately 1:50 into 250 ml of Terrific Broth with 30 μg/ml of chloramphenicol, to a final OD600 of approximately 0.05. The cultures were incubated for approximately 3 h at 30° C., 250 rpm, to an OD600 of 0.6-0.8, and then induced with the addition of IPTG at a final concentration of 1 mM. The induced cultures were incubated for 20 h at 30° C., 250 rpm. Following this incubation period, the cultures were centrifuged at 4000 rpm×10 min. The culture supernatant was discarded, and the pellets were resuspended in 35 ml of 50 mM Tris-HCl, pH 7.5. This cell suspension was chilled in an ice bath and lysed using a Microfluidizer cell disruptor (Microfluidics M-110L). The crude lysate was pelleted by centrifugation (16,000 rpm for 60 min at 4° C.), and the supernatant was then filtered through a 0.2 μm PES membrane to further clarify the lysate. These RNA ligase 2 lysates were supplemented with 20 mM imidazole and 500 mM NaCl. Lysates were then purified using an ÄKTA Pure purification system and a 5 ml HisTrap FF column (GE Healthcare) using the run parameters provided below in Table 1. The wash buffer comprised 50 mM Tris-HCl pH 8, 500 mM NaCl, 20 mM imidazole, and the elution buffer comprised 50 mM Tris-HCl, pH 8, 500 mM NaCl, 300 mM imidazole:

TABLE 1
FPLC Run Parameters

| Parameter | Volume | Units |
|---|---|---|
| Column volume | 5 | ml |
| Flow rate | 12 | ml/min |
| Pressure limit pre-column | 0.5 | MPa |
| Pressure limit delta-column | 0.3 | MPa |
| Sample volume | 50 | mls |
| Equilibration volume | 5 | CV |
| Wash Unbound volume | 15 | CV |
| Isocratic (step) Elution volume | 5 | CV |
| Fraction volume | 1.5 | mls |
| RE-equilibration volume | 5 | CV |

[0374] The most concentrated fractions were identified by UV absorption (A280) and pooled; 3 ml of eluate was dialyzed overnight in 1×ligase storage buffer (10 mM Tris-HCl pH 7.5, 50 mM KCl, 35 mM ammonium sulfate, 50% glycerol) overnight in a 3K Slide-A-Lyzer™ dialysis cassette (Thermo Fisher) for buffer exchange. RNA ligase 2 concentrations in the preparations were measured by absorption at 280 nm.

### Example 4

[0375] Improvements Over SEQ ID NO: 2 in qPCR Amplification Activity

[0376] The oligonucleotides in Table 2 were used to assay RNA ligase activity. Each of the oligonucleotides are in the 5′-3′ direction.

TABLE 2
RNA Ligase Oligonucleotide Substrates

| Ligase Substrate Name | Sequence |
|---|---|
| sense strand fragment 1 | UUGCCAAGCUUGGU (SEQ ID NO: 583) |
| sense strand fragment 2 | CAUCUAGCAG (SEQ ID NO: 584) |
| sense strand fragment 3 | CCGAAAGGCUGC (SEQ ID NO: 585) |
| sense strand fragment 4 | CAUCUAGCAGCCGAAAGG (SEQ ID NO: 586) |
| sense strand fragment 5 | CUGC |
| antisense strand fragment 1 | AGCUUGGCAAGG (SEQ ID NO: 587) |
| antisense strand fragment 2 | UAGAUGACCA (SEQ ID NO: 588) |
| antisense strand fragment 3 | GCAAGG |
| antisense strand fragment 4 | AGCUUG |

[0377] The oligonucleotides in Table 2 have the following features. Sense strand fragment 1 has a 2-O-methyl on nucleotide residues 1-7 and 12-14, a 2′-fluoro on nucleotide residues 8-11, a 5′-OH terminus, a 3′-OH terminus, and a phosphorothioate internucleotide linkage between nucleotide residues 1-2. Sense strand fragment 2 has a 2′-O-methyl on nucleotide residues 1-10, a 5′-phosphate terminus, and a 3-OH terminus. Sense fragment 3 has 2′-O-methyl on nucleotide residues 1-3 and 7-12, a 5′-phosphate terminus, a 3′-OH terminus, and a GalNac moiety attached to the 2′ position of each nucleotide residues 4-6, as shown below. Sense fragment 4 has 2′-O-methyl on nucleotide residues 1-13 and 17-18, a 5′-phosphate terminus, a 3′-OH terminus, and a GalNac attached to the 2′ position of each of nucleotide residues 14-16, as shown below. Sense strand fragment 5 has 2′-O-methyl on nucleotide residues 1-4, a 5′-phosphate terminus, and a 3′-OH terminus. Antisense fragment 1 has 2′-O-methyl on nucleotide residues 1-3 and 5-12, a 2′-fluoro on nucleotide residue 4, a 5′-phosphate terminus, a 3′-OH terminus, and a phosphorothioate internucleotide linkage between nucleotide residues 10-11 and 11-12. Antisense fragment 2 has 2′-O-methyl on nucleotide residues 1, 6, 8, and 9, a 2′-fluoro on nucleotide residues 2-5, 7, and 10, a 5′-monomethylphosphate terminus, a 3′-OH terminus, and a phosphorothioate internucleotide linkage between each of residues 1-2, 2-3, and 3-4. Antisense fragment 3 has 2′-O-methyl on nucleotide residues 1-6, a 5′-phosphate terminus, a 3′-OH terminus, and a phosphorothioate internucleotide linkage between each of nucleotide residues 4-5 and 5-6. Antisense fragment 4 has 2′-O-methyl on nucleotide residues 1-3 and 5-6, a 2′-fluoro on nucleotide residue 4, a 5′-phosphate terminus, and a 3′-OH terminus. The combination of oligonucleotides used in the RNA ligase reactions are provided in Table 3.

TABLE 3

| Reaction # | Oligonucleotides |
|---|---|
| 1 | sense strand fragment 1 |
| | sense strand fragment 4 |
| | sense strand fragment 5 |
| | antisense strand fragment 1 |
| | antisense strand fragment 2 |
| 2 | sense strand fragment 1 |
| | sense strand fragment 2 |
| | sense strand fragment 3 |
| | antisense strand fragment 1 |
| | antisense strand fragment 2 |
| 3 | sense strand fragment 1 |
| | sense strand fragment 4 |
| | sense strand fragment 5 |
| | antisense strand fragment 2 |
| | antisense strand fragment 3 |
| | antisense strand fragment 4 |
| 4 | sense strand fragment 1 |
| | sense strand fragment 2 |
| | sense strand fragment 3 |
| | antisense strand fragment 2 |
| | antisense strand fragment 3 |
| | antisense strand fragment 4 |

[0378] The GalNac residues are attached to the 2′ position of the adenine nucleotide residues as follows:

[chemical structure]

[0379] The target product of each of the ligation reactions in Table 3 has the following sequences: Product 1—UUGCCAAGCUUGGUCAUCUAGCAGCCGAAAGGCUGC (SEQ NO: 589) and Product 2—UAGAUGACCAAGCUUGGCAAGG (SEQ NO: 590), where each of the products have the modifications in the substrate oligonucleotides, and where Product 1 and Product 2 are hybridized to each other to form a shRNA with the GalNac ligands.

[0380] To test sample activity, 0.1 g/L protein was assayed in reactions containing 50 mM Tris-HCl buffer at pH 7.5, 2 mM MgCl₂, 1 mM DTT, 0.4 mM ATP, and 0.4 mM of an equimolar mixture of the fragments compromising either of the 4 reactions (Reaction 1: sense strands 1, 4, and 5, and antisense strands 1-2; Reaction 2: sense strands 1-3, and antisense strands 1-2; Reaction 3: sense strands 1, 4 and 5, and antisense strands 2-4; or Reaction 4: sense strands 1-3, and antisense strands 2-4. The reactions were mixed before being incubated for 2 hours at 37° C. in a PCR thermocycler. Afterwards, EDTA was added to each reaction to a final concentration of 10.0 mM and the samples analyzed via UPLC to quantify the remaining fragment concentrations and product yields.

[0381] The % Conversions relative to SEQ ID NO: 2 were calculated as in the following:

$$\% conversion = \frac{area under the curve for all products}{\begin{matrix}Total area under the curve for all \\ products and remaining fragments\end{matrix}} * 100$$

using Analytical method 13.1, and the results are shown in Table 4.1.

TABLE 4.1
Relative to SEQ ID NO: 2

| SEQ ID | Reaction 1 % Conv. | Reaction 2 % | Reaction 3 % Conv. | Reaction 4 % Conv. |
|---|---|---|---|---|
| NO: | Relative to SEQ ID | Conv. Relative to | Relative to SEQ ID | Relative to SEQ ID |
| (nt/aa) | NO: 2 | SEQ ID NO: 2 | NO: 2 | NO: 2 |
| 1/2 | +++ | +++ | + | + |
| 3/4 | ++ | ++ | + | + |
| 5/6 | + | + | + | + |
| 7/8 | + | + | + | + |
| 9/10 | + | + | + | + |
| 11/12 | ++ | ++ | +++ | ++ |
| 13/14 | +++ | +++ | +++ | +++ |
| 15/16 | + | + | ++ | + |
| 17/18 | + | + | ++ | +++ |
| 19/20 | ++ | + | + | ++ |
| 21/22 | + | ++ | ++ | ++ |
| | Levels of increased | Levels of increased | Levels of increased | Levels of increased |
| | activity were | activity were | activity were | activity were |
| | determined relative | determined relative | determined | determined relative to |
| | to the reference | to the reference | relative to the | the reference |
| | polypeptide of SEQ | polypeptide of SEQ | reference polypeptide | polypeptide of SEQ |
| | ID NO: 2 and | ID NO: 2 and | of SEQ ID | ID NO: 2 and defined |
| | defined as follows: | defined as follows: | NO: 2 and defined as | as follows: “+” 5.21 to |
| | “+” .37 to 72.44 (first | “+” .00 to 57.00 | follows: “+” 5.59 to | 53.26 |
| | 50%), “++” > 72.44 | (first 50%), “++” > | 37.02 (first 50%), | (first 50%), “++” > |
| | (next 30%), “+++” > | 57.00 (next 30%), | “++” > 37.02 (next | 53.26 (next 30%), |
| | 89.03 (top 20%) | “+++” > 77.50 (top | 30%), “+++” > 40.68 | “+++” > 54.51 (top |
| | | 20%) | (top 20%) | 20%) |

[0382] To test thermostability, each sample was incubated at 1.5 g/L in 40 mM Tris-HCl at pH 7.5, 100 mM KCl, 0.1 mM EDTA for 1 hour at room temperature and from 30 to 80° C. After incubation, the activity of each sample was tested: 0.05 g/L protein was assayed in reactions containing 50 mM Tris-HCl buffer at pH 7.5, 2 mM MgCl₂, 1 mM DTT, 0.4 mM ATP, and 0.4 mM of an equimolar mixture of the fragments compromising Reaction 2 (sense strands 1-3, and antisense strands 1-2). The reactions were mixed before being incubated for 2 hours at 37° C. in a PCR thermocycler. Afterwards, EDTA was added to each reaction to a final concentration of 10.0 mM and the samples analyzed via UPLC to quantify the remaining fragment concentrations and product yields.

[0383] Using plots of % residual activity vs. incubation temperature, the temperature at which 50% of the untested sample relative to SEQ ID NO: 2 were calculated as in the following:

$$\% residual activity = \frac{\% conversion at temperature}{\% conversion sample at room temperature} * 100$$

using Analytical method 13.1, and the results are shown in Table 4.2.

TABLE 4.2
Relative to SEQ ID NO: 2

| SEQ ID NO: (nt/aa) | Stability Ranking Relative to SEQ ID NO: 2 |
|---|---|
| 1/2 | + |
| 3/4 | + |
| 5/6 | +++ |
| 7/8 | +++ |
| 9/10 | + |
| 11/12 | + |
| 13/14 | + |
| 15/16 | ++ |
| 17/18 | ++ |
| 19/20 | + |
| 21/22 | ++ |

Levels of increased activity were determined relative to the reference polypeptide of SEQ ID NO: 2 and defined as follows: “+” 1.00 to 1.00 (first 50%), “++” > 1.00 (next 30%), “+++” > 3.00 (top 20%)

### Example 5

### Improvements Over SEQ ID NO: 14 in RNA Ligase 2 Activity

[0384] SEQ ID NO: 14 was selected as the parent enzyme after screening for activity on all four reaction ligation scenarios and for stability. Libraries of engineered genes were produced using established techniques (e.g., saturation mutagenesis, recombination of previously identified beneficial mutations). The polypeptides encoded by each gene were produced in HTP as described in Example 1, and the cell paste was generated as described in Example 2.

[0385] To prepare cells for lysis, 300 μl of 0.1 mg/mL lysozyme in 50 mM Tris-HCl buffer at pH 7.5 was added to the cell paste of each sample. After thorough resuspension, the cells were incubated at 40° C. for 1 hour in a PCR thermocycler, then again at 44° C. for another hour. The samples were then centrifuged for 10 minutes at 4000 rpm and 4° C. and the clear supernatants used in subsequent biocatalytic reactions.

[0386] To screen, 20%(v/v) lysate was transferred into reactions containing 50 mM Tris-HCl buffer at pH 7.5, 2 mM MgCl2, 1 mM DTT, 0.4 mM ATP, and 0.4 mM of an equimolar mixture of the fragments compromising Reaction 2 (sense strands 1-3, and antisense strands 1-2). The reactions were mixed before being incubated for 16 hours at 37° C. in a PCR thermocycler. Afterwards, EDTA was added to each reaction to a final concentration of 18.3 mM and the samples analyzed via UPLC to quantify the remaining fragment concentrations and product yields.

[0387] Using peak area from Analytical method 13.1, the % conversion for each sample was calculated as shown here:

$$\% conversion = \frac{area under the curve for all products}{\begin{matrix}Total area under the curve for all \\ products and remaining fragments\end{matrix}} * 100$$

[0388] Activity relative to SEQ ID NO: 14 (FIOP) was calculated as the % conversion formed by the variant over % conversion of SEQ ID NO: 14 and shown in Table 5.1.

TABLE 5.1
Relative to SEQ ID NO: 14

| SEQ | | FIOP |
|---|---|---|
| ID NO: | Amino Acid Differences | to SEQ ID |
| (nt/aa) | (Relative to SEQ ID NO: 14) | NO: 14 |
| 23/24 | V177P/T260S/N307E/L345V | +++ |
| 25/26 | A171E/Q175K/I183V/S280N/L283I/K303Q | +++ |
| 27/28 | M95V/L159F/V177P/T260S/S288E | +++ |
| 29/30 | Q175K/I183V/A247K/S280N/L283I/R296K | +++ |
| 31/32 | V177P/N307E | +++ |
| 33/34 | H81Y/A171E/I1183V/N335D | +++ |
| 35/36 | Q175K/I183V | +++ |
| 37/38 | H81Y/Q175K/I183V/S280N/R296K/N335D/S339P | +++ |
| 39/40 | H81Y/I183V/A247K/V266L | +++ |
| 41/42 | M95V/V177P | +++ |
| 43/44 | A171E/S280N/L283I/R296K/K303Q | ++ |
| 45/46 | M85L/V177P/T260S/S288E/I333V/L345V | ++ |
| 47/48 | V177P/A291P/N307E/I333V | ++ |
| 49/50 | H81Y/A171E/Q175K/I183V/M316L/I337L | ++ |
| 51/52 | H81Y/A171E/V266L/S280N/L283I/N335D/S339P | ++ |
| 53/54 | V177P | ++ |
| 55/56 | M95V/L159F/V177P/T260S/S280N/S288E/I306L/L345V | ++ |
| 57/58 | A171E/Q175K/N335D | ++ |
| 59/60 | V177P/T260S/I306L/I333V | ++ |
| 61/62 | A14K/M95V/V177P/S288E/N307E | ++ |
| 63/64 | M95V/V177P/L345V | ++ |
| 65/66 | M95V/L159F/V177P/T260S/H285K/S288E | ++ |
| 67/68 | V266L/R296K | ++ |
| 69/70 | H81Y/L283I/N335D/I337L | ++ |
| 71/72 | M95V/L159F/V177P/T260S/H342I/L345V | ++ |
| 73/74 | I63V/A171E/Q175K/I183V/V266L/S280N/R296K/M316L | ++ |
| 75/76 | S280N/N335D/I337L | + |
| 77/78 | H81Y/A171E/S280N | + |
| 79/80 | H81Y/A171E/Q175K/R296K/M316L | + |
| 81/82 | A171E/Q175K/M316L/N335D | + |
| 83/84 | A171E/S280N/L283I/R296K/M316L | + |
| 85/86 | A171E/L283I/N335D | + |
| 87/88 | I63V/A171E/Q175K/I183V/V266L/L283I/K303Q/M316L | + |
| 89/90 | A171E/A247K/V266L/L283I/R296K/K303Q/M316L/ | + |
| | N335D | |
| 91/92 | I63V/H81Y/A171E/Q175K/I183V/V266L/S280N/L283I/ | + |
| | I337L | |
| 93/94 | H81Y/A171E/K303Q/M316L/N335D | + |
| 95/96 | S288E/N307E | + |
| 97/98 | A14K/M95V/L159F/V177P/L345V | + |
| 99/100 | H81Y/A171E/Q175K/I183V/A247K/V266L/S280N/L283I | + |
| 101/102 | H81Y/A247K/V266L | + |
| 103/104 | S280N | + |
| 105/106 | M85L/V177P/T260S | + |
| 107/108 | I63V/I183V | + |
| 109/110 | Q175K/I183V/A247K/S280N/L283I/M316L | + |
| 111/112 | A291P | + |
| 113/114 | A247K | + |
| 115/116 | A171E/S280N/L283I | + |
| 117/118 | H81Y/A171E/Q175K/S280N/M316L | + |
| 119/120 | I333V | + |
| 121/122 | A171E/R296K/M316L | + |
| 123/124 | H81Y/A171E | + |
| 125/126 | S280N/M316L/N335D | + |

Levels of increased activity were determined relative to the reference polypeptide of SEQ ID NO: 14 and defined as follows: “+” 1.81 to 3.45 (first 50%), “++” > 3.45 (next 30%), “+++” > 6.07 (top 20%).

### Example 6

### Improvements Over SEQ ID NO: 42 in RNA Ligase 2 Activity

[0389] SEQ ID NO: 42 was selected as the parent enzyme after screening variants as described in Example 5 above. Libraries of engineered genes were produced using established techniques (e.g., saturation mutagenesis, recombination of previously identified beneficial mutations). The polypeptides encoded by each gene were produced in HTP as described in Example 1 and the cell paste was generated as described in Example 2.

[0390] To prepare cells for lysis, 300 μl of 0.1 mg/mL lysozyme in 50 mM Tris-HCl buffer at pH 7.5 was added to the cell paste of each sample. After thorough resuspension, the cells were incubated at 45° C. for 1 hr in a PCR thermocycler. The samples were then centrifuged for 10 minutes at 4000 rpm and 4° C. and the clear supernatants used in subsequent biocatalytic reactions.

[0391] To screen, 20%(v/v) lysate was transferred into reactions containing 50 mM Tris-HCl buffer at pH 7.5, 2 mM MgCl₂, 1 mM DTT, 0.4 mM ATP, and 0.4 mM of an equimolar mixture of the fragments compromising Reaction 2 (sense strands 1-3, and antisense strands 1-2). The reactions were mixed before being incubated for 16 hours at 37° C. in a PCR thermocycler. Afterwards, EDTA was added to each reaction to a final concentration of 18.3 mM and the samples analyzed via UPLC to quantify the remaining fragment concentrations and product yields.

[0392] Using peak area from Analytical method 13.1, the % conversion for each sample was calculated as shown here:

$$\% conversion = \frac{area under the curve for all products}{\begin{matrix}Total area under the curve for all \\ products and remaining fragments\end{matrix}} * 100$$

[0393] Activity relative to SEQ ID NO: 42 (FIOP) was calculated as the % conversion formed by the variant over % conversion of SEQ ID NO: 42 and shown in Table 6.1.

TABLE 6.1
Relative to SEQ ID NO: 42

| SEQ | Amino Acid | Amino Acid | FIOP |
|---|---|---|---|
| ID | Differences | Differences | Relative to |
| NO: | (Relative to | (Relative to | SEQ ID |
| (nt/aa) | SEQ ID NO: 14) | SEQ ID NO: 42) | NO: 42 |
| 223/224 | M95V/V149R/G156T/V177P/D195G | V149R/G156T/D195G | +++ |
| 225/226 | K15M/M95V/V149T/V177P/Y186R/ | K15M/V149T/Y186R/N224Y/ | +++ |
| | N224Y/L317A | L317A | |
| 227/228 | K15P/M95V/G156T/V177P/D195G/ | K15P/G156T/D195G/N224Y/ | +++ |
| | N224Y/K226I/L317A/I331L | K226I/L317A/I331L | |
| 229/230 | K15M/M95V/V177P/D195G/L317A/ | K15M/D195G/L317A/I331R | +++ |
| | I331R | | |
| 231/232 | M95V/V149R/V177P/N224Y/I331R | V149R/N224Y/I331R | +++ |
| 233/234 | K15E/M95V/V177P/D195G/N224Y/ | K15E/D195G/N224Y/K226I/ | +++ |
| | K226I/L317A/I331W | L317A/I331W | |
| 235/236 | K15P/G33L/K86G/M95V/V149R/ | K15P/G33L/K86G/V149R/ | +++ |
| | A154C/V177P/D195G/L317A | A154C/D195G/L317A | |
| 237/238 | K15M/K86G/M95V/A154C/G156T/ | K15M/K86G/A154C/G156T/ | +++ |
| | V177P/Y186R/D195G/N224Y/K226I/ | Y186R/D195G/N224Y/K226I/ | |
| | I331L | I331L | |
| 239/240 | K15P/M95V/V149R/V177P/N224Y/ | K15P/V149R/N224Y/L317A/ | +++ |
| | L317A/I331R | I331R | |
| 241/242 | K15M/M95V/A154C/G156T/V177P/ | K15M/A154C/G156T/Y186R/ | +++ |
| | Y186R/L317A/I331R | L317A/I331R | |
| 243/244 | K15M/G33L/M95V/V149R/V177P/ | K15M/G33L/V149R/N224Y/ | +++ |
| | N224Y/K226I/I331W | K226I/I331W | |
| 245/246 | K15E/M95V/V177P/Y186R/N224Y/ | K15E/Y186R/N224Y/K226I/ | +++ |
| | K226I/L317A/I331R | L317A/I331R | |
| 247/248 | K15Y/G33L/M95V/V149R/V177P/ | K15Y/G33L/V149R/Y186R/ | +++ |
| | Y186R/N224Y/I331R | N224Y/I331R | |
| 249/250 | M95V/V177P/D195G/N224Y/I331R | D195G/N224Y/I331R | +++ |
| 251/252 | K15P/K86G/M95V/G156T/V177P/ | K15P/K86G/G156T/Y186R/D195 | +++ |
| | Y186R/D195G/K226I/L317A/I331L | G/K226I/L317A/I331L | |
| 253/254 | K15M/M95V/V177P/D195G/K226I/ | K15M/D195G/K226I/I331W | +++ |
| | I331W | | |
| 255/256 | M95V/G156T/V177P/Y186R/N224Y/ | G156T/Y186R/N224Y/K226I/ | +++ |
| | K226I/I331R | I331R | |
| 257/258 | K15Y/M95V/V149R/A154C/G156T/ | K15Y/V149R/A154C/G156T/ | +++ |
| | V177P/N224Y/K226I | N224Y/K226I | |
| 259/260 | G33L/M95V/G156T/V177P/Y186R/ | G33L/G156T/Y186R/D195G/ | +++ |
| | D195G/I331L | I331L | |
| 261/262 | K15P/K86G/M95V/V149R/A154C/ | K15P/K86G/V149R/A154C/ | +++ |
| | G156T/V177P/L317A/I331R | G156T/L317A/I331R | |
| 263/264 | K15M/M95V/V177P/Y186D/L317A/ | K15M/Y186D/L317A/I331R | +++ |
| | I331R | | |
| 265/266 | K15P/K86G/M95V/V149R/A154C/ | K15P/K86G/V149R/A154C/ | +++ |
| | V177P/D195G/I331L | D195G/I331L | |
| 267/268 | K15Y/G33L/M95V/V149T/A154C/ | K15Y/G33L/V149T/A154C/ | +++ |
| | G156T/V177P/K226I | G156T/K226I | |
| 269/270 | K15P/M95V/V149R/A154C/V177P/ | K15P/V149R/A154C/Y186R/ | +++ |
| | Y186R/L317A/I331L | L317A/I331L | |
| 271/272 | M95V/V177P/D195G/I331R | D195G/I331R | +++ |
| 273/274 | K15M/K86G/M95V/G156T/V177P/ | K15M/K86G/G156T/Y186R/ | +++ |
| | Y186R/D195G/I331W | D195G/I331W | |
| 275/276 | M95V/V149R/G156T/V177P/N224Y/ | V149R/G156T/N224Y/K226I/ | ++ |
| | K226I/I331W | I331W | |
| 277/278 | K15P/M95V/V149R/A154C/G156T/ | K15P/V149R/A154C/G156T/ | ++ |
| | V177P/Y186R/L317A/I331L | Y186R/L317A/I331L | |
| 279/280 | K15Y/M95V/A154C/V177P/Y186D/ | K15Y/A154C/Y186D/D195G | ++ |
| | D195G/ | | |
| 281/282 | K15E/K86G/M95V/V177P/D195G/ | K15E/K86G/D195G/N224Y/ | ++ |
| | N224Y/K226I | K226I | |
| 283/284 | M95V/V177P/N230D | N230D | ++ |
| 285/286 | K15P/G33L/M95V/G156T/V177P/ | K15P/G33L/G156T/I331R | ++ |
| | I331R | | |
| 287/288 | K15L/G33L/M95V/G156T/V177P/ | K15L/G33L/G156T/D195G/ | ++ |
| | D195G/N224Y/K226I | N224Y/K226I | |
| 289/290 | G33L/M95V/V149R/G156T/V177P/ | G33L/V149R/G156T/L317A | ++ |
| | L317A | | |
| 291/292 | K15E/G33L/M95V/V177P/Y186R/ | K15E/G33L/Y186R/D195G | ++ |
| | D195G | | |
| 293/294 | M95V/V177P/Q334R | Q334R | ++ |
| 295/296 | K15E/M95V/A154C/G156T/V177P/ | K15E/A154C/G156T/N224Y/ | ++ |
| | N224Y/L317A | L317A | |
| 297/298 | K15Y/M95V/V149R/V177P/Y186R/ | K15Y/V149R/Y186R/I331W | ++ |
| | I331W | | |
| 299/300 | K15Y/K86G/M95V/V149T/V177P/ | K15Y/K86G/V149T/Y186R/ | ++ |
| | Y186R/D195G/L317A | D195G/L317A | |
| 301/302 | K15P/G33L/M95V/A154C/V177P/ | K15P/G33L/A154C/D195G | ++ |
| | D195G | | |
| 303/304 | K15P/M95V/A154C/G156T/V177P/ | K15P/A154C/G156T/Y186R/ | ++ |
| | Y186R/L317A/I331R | L317A/I331R | |
| 305/306 | K15M/M95V/G156T/V177P/Y186R/ | K15M/G156T/Y186R/I331R | ++ |
| | I331R | | |
| 307/308 | K15Y/M95V/V149T/V177P/Y186D/ | K15Y/V149T/Y186D/L317A | ++ |
| | L317A | | |
| 309/310 | K15E/G33L/M95V/G156T/V177P/ | K15E/G33L/G156T/Y186R/ | ++ |
| | Y186R/V214I/N224Y/I331W | V214I/N224Y/I331W | |
| 311/312 | K15E/K86G/M95V/V177P/Y186R/ | K15E/K86G/Y186R/N224Y/ | ++ |
| | N224Y/K226I/L317A | K226I/L317A | |
| 313/314 | K15P/M95V/A154C/V177P/I331R/ | K15P/A154C/I331R | ++ |
| 315/316 | K15Y/M95V/V149T/A154C/V177P/ | K15Y/V149T/A154C/K226I | ++ |
| | K226I | | |
| 317/318 | K15Y/G33L/M95V/V177P/D195G/ | K15Y/G33L/D195G/K226I | ++ |
| | K226I | | |
| 319/320 | K15M/M95V/V177P/N224Y/L317A/ | K15M/N224Y/L317A/I331W | ++ |
| | I331W | | |
| 321/322 | K15E/K86G/M95V/V177P/Y186R/ | K15E/K86G/Y186R/D195G/ | ++ |
| | D195G/L317A | L317A | |
| 323/324 | M95V/V177P/K226I/L317A/I331L | K226I/L317A/I331L | ++ |
| 325/326 | M95V/V177P/T330R | T330R | ++ |
| 327/328 | K89W/M95V/V177P | K89W | ++ |
| 329/330 | K15P/M95V/V149R/V177P/Y186D/ | K15P/V149R/Y186D/I331L | ++ |
| | I331L | | |
| 331/332 | K15P/M95V/V149R/V177P/Y186R | K15P/V149R/Y186R | ++ |
| 333/334 | K89M/M95V/V177P | K89M | ++ |
| 335/336 | M95V/G156T/V177P/D195G/I331L | G156T/D195G/I331L | ++ |
| 337/338 | M95V/G156A/V177P | G156A | ++ |
| 339/340 | K15E/K86G/M95V/G156T/V177P/ | K15E/K86G/G156T/Y186R/ | ++ |
| | Y186R/I331R | I331R | |
| 341/342 | M95V/V177P/D195G/I331W | D195G/I331W | ++ |
| 343/344 | M95V/V177P/T275N | T275N | ++ |
| 345/346 | K15P/G33L/M95V/V177P/Y186R/ | K15P/G33L/Y186R/N224Y | ++ |
| | N224Y | | |
| 347/348 | K15E/M95V/V177P/Y186R/L317A | K15E/Y186R/L317A | ++ |
| 349/350 | K15M/G33L/M95V/V177P/Y186R/ | K15M/G33L/Y186R/K226I/ | ++ |
| | K226I/L317A | L317A | |
| 351/352 | K89G/M95V/V177P | K89G | + |
| 353/354 | K15Y/M95V/V149R/A154C/G156T/ | K15Y/V149R/A154C/G156T/ | + |
| | V177P/I331W | I331W | |
| 355/356 | K15Y/M95V/A154C/V177P/K226I/ | K15Y/A154C/K226I/L317A | + |
| | L317A | | |
| 357/358 | K15Y/K86G/M95V/G156T/V177P/ | K15Y/K86G/G156T/Y186R/ | + |
| | Y186R/D195G/L317A | D195G/L317A | |
| 359/360 | M95V/V177P/V257L | V257L | + |
| 361/362 | K15Y/M95V/A154C/G156T/V177P/ | K15Y/A154C/G156T/Y186D | + |
| | Y186D | | |
| 363/364 | G33L/M95V/V177P/Y186R/N224Y | G33L/Y186R/N224Y | + |
| 365/366 | M95V/V177P/N335H | N335H | + |
| 367/368 | K15Y/K86G/M95V/G156T/V177P/ | K15Y/K86G/G156T/Y186R/ | + |
| | Y186R/D195G/N224Y/I331W | D195G/N224Y/I331W | |
| 369/370 | M95V/A154C/G156T/V177P/L317A | A154C/G156T/L317A | + |
| 371/372 | H39Q/M95V/V177P | H39Q | + |
| 373/374 | H2G/M95V/V177P | H2G | + |
| 375/376 | K15M/M95V/V177P/N224Y/K226I/ | K15M/N224Y/K226I/I331R | + |
| | I331R | | |
| 377/378 | K15M/G33L/M95V/V149R/V177P/ | K15M/G33L/V149R/N224Y | + |
| | N224Y | | |
| 379/380 | K89I/M95V/V177P/N307Q | K89I/N307Q | + |
| 381/382 | K15M/M95V/A154C/G156T/V177P/ | K15M/A154C/G156T/L317A | + |
| | L317A | | |
| 383/384 | K15E/M95V/V177P/Y186R/I331W | K15E/Y186R/I331W | + |
| 385/386 | K15P/G33L/M95V/A154C/V177P/ | K15P/G33L/A154C/L317A | + |
| | L317A | | |
| 387/388 | K89H/M95V/V177P | K89H | + |
| 389/390 | K15Y/G33L/M95V/V177P/D195G/ | K15Y/G33L/D195G/N224Y/ | + |
| | N224Y/L317A | L317A | |
| 391/392 | K15E/M95V/G156T/V177P/N224Y/ | K15E/G156T/N224Y/K226I | + |
| | K226I | | |
| 393/394 | M95V/A154C/V177P/Y186R/I331L | A154C/Y186R/I331L | + |
| 395/396 | M95V/V177P/N185G | N185G | + |
| 397/398 | K15M/S18I/M95V/V149R/V177P/ | K15M/S18I/V149R/Y186R/ | + |
| | Y186R/D195G | D195G | |
| 399/400 | K86G/M95V/V149R/A154C/G156T/ | K86G/V149R/A154C/G156T | + |
| | V177P | | |
| 401/402 | K15P/G33L/M95V/V149R/V177P/ | K15P/G33L/V149R/I331L | + |
| | I331L | | |
| 403/404 | M95V/V177P/K326R | K326R | + |
| 405/406 | M95V/V177P/H202Y | H202Y | + |
| 407/408 | M95V/Q119T/V177P | Q119T | + |
| 409/410 | M95V/V177P/T212I | T212I | + |
| 411/412 | H2V/M95V/V177P | H2V | + |
| 413/414 | K15E/M95V/V149R/A154C/G156T/ | K15E/V149R/A154C/G156T/ | + |
| | V177P/I331L | I331L | |
| 415/416 | K15P/G33L/M95V/G156T/V177P/ | K15P/G33L/G156T/L317A | + |
| | L317A | | |
| 417/418 | K15Y/M95V/A154C/G156T/V177P/ | K15Y/A154C/G156T/L317A | + |
| | L317A | | |
| 419/420 | M95V/G156L/V177P | G156L | + |
| 421/422 | M95V/V177P/N335D | N335D | + |
| 423/424 | M95V/G156T/V177P | G156T | + |
| 425/426 | H2E/M95V/V177P | H2E | + |
| 427/428 | M95V/V177P/S280G | S280G | + |
| 429/430 | M95V/K142R/V177P | K142R | + |
| 431/432 | K15E/M95V/V149R/V177P | K15E/V149R | + |
| 433/434 | M95V/G156Q/V177P | G156Q | + |
| 435/436 | K15E/G33L/K86G/M95V/G156T/ | K15E/G33L/K86G/G156T/ | + |
| | V177P/D195G | D195G | |
| 437/438 | M95V/V177P/D315T | D315T | + |
| 439/440 | M95V/V177P/N185K | N185K | + |
| 441/442 | H39S/M95V/V177P | H39S | + |
| 443/444 | M95V/V177P/K256A | K256A | + |
| 445/446 | K15Y/G33L/M95V/G156T/V177P/ | K15Y/G33L/G156T/Y186D | + |
| | Y186D | | |
| 447/448 | M95V/S138R/V177P | S138R | + |
| 449/450 | M95V/G117D/V177P | G117D | + |
| 451/452 | M95V/G116N/V177P | G116N | + |
| 453/454 | M95V/V177P/M316L | M316L | + |
| 455/456 | K15M/M95V/V149R/V177P | K15M/V149R | + |
| 457/458 | T69D/M95V/V177P | T69D | + |
| 459/460 | M95V/G156N/V177P | G156N | + |
| 461/462 | M95V/V177P/A310K | A310K | + |
| 463/464 | M95V/V177P/L317A | L317A | + |
| 465/466 | K15Y/M95V/V177P/D195G/I331L | K15Y/D195G/I331L | + |
| 467/468 | K15M/G33L/M95V/V177P/I331L | K15M/G33L/I331L | + |
| 469/470 | M95V/V177P/T330M | T330M | + |
| 471/472 | M95V/V177P/H314W | H314W | + |
| 473/474 | M95V/Y144W/V177P | Y144W | |
| 475/476 | K15Y/M95V/V149R/V177P | K15Y/V149R | + |
| 477/478 | M95V/V177P/D315S | D315S | + |

Levels of increased activity were determined relative to the reference polypeptide of SEQ ID NO: 42 and defined as follows: “+” 2.00 to 3.82 (first 50%), “++” > 3.82 (next 30%), “+++” > 8.29 (top 20%)

### Example 7

### Improvements Over SEQ ID NO: 128 in RNA Ligase 2 Activity

[0394] SEQ ID NO: 42 was recloned into a pJV vector to give SEQ ID NO: 128, which was further selected as the parent enzyme. Libraries of engineered genes were produced using established techniques (e.g., saturation mutagenesis, recombination of previously identified beneficial mutations). The polypeptides encoded by each gene were produced in HIP as described in Example 1 and the cell paste was generated as described in Example 2.

[0395] To prepare cells for lysis, 300 μl of 0.1 mg/mL lysozyme in 50 mM Tris-HCl buffer at pH 7.5 was added to the cell paste of each sample. After thorough resuspension, the cells were incubated at 45° C. for 1 hour in a PCR thermocycler. The samples were then centrifuged for 10 minutes at 4000 rpm and 4° C. and the clear supernatants used in subsequent biocatalytic reactions.

[0396] To screen, 20%(v/v) lysate was transferred into reactions containing 50 mM Tris-HCl buffer at pH 7.5, 2 mM MgCl₂, 1 mM DTT, 0.4 mM ATP, and 0.4 mM of an equimolar mixture of the fragments compromising Reaction 2 (sense strands 1-3, and antisense strands 1-2). The reactions were mixed before being incubated for 16 hours at 37° C. in a PCR thermocycler. Afterwards, EDTA was added to each reaction to a final concentration of 18.3 mM and the samples analyzed via UPLC to quantify the remaining fragment concentrations and product yields.

[0397] Using peak area from Analytical method 13.1, the % conversion for each sample was calculated as shown here:

$$\% conversion = \frac{area under the curve for all products}{\begin{matrix}Total area under the curve for all \\ products and remaining fragments\end{matrix}} * 100$$

[0398] Activity relative to SEQ ID NO: 128 (FIOP) was calculated as the % conversion formed by the variant over % conversion of SEQ ID NO: 128 and shown in Table 7.1.

TABLE 7.1
Relative to SEQ ID NO: 128

| SEQ | Amino Acid | Amino Acid | FIOP |
|---|---|---|---|
| ID | Differences | Differences | Relative to |
| NO: | (Relative to | (Relative to | SEQ ID |
| (nt/aa) | SEQ ID NO: 14) | SEQ ID NO: 128) | NO: 128 |
| 129/130 | K15M/M95V/V149R/A154C/G156T/ | K15M/V149R/A154C/G156T/ | +++ |
| | V177P/Y186R/D195G/I331R | Y186R/D195G/I331R | |
| 131/132 | M95V/V149R/A154C/V177P/Y186D/ | V149R/A154C/Y186D/D195G/ | +++ |
| | D195G/N224Y/L317A/I331R | N224Y/L317A/I331R | |
| 133/134 | K15M/G33L/M95V/V149T/A154C/ | K15M/G33L/V149T/A154C/ | +++ |
| | V177P/Y186R/D195G | Y186R/D195G | |
| 135/136 | M95V/V149R/G156T/V177P/Y186R/ | V149R/G156T/Y186R/D195G/ | +++ |
| | D195G/N224Y/K226I/L317A | N224Y/K226I/L317A | |
| 137/138 | K15Y/M95V/V149R/G156T/V177P/ | K15Y/V149R/G156T/D195G/ | +++ |
| | D195G/N224Y/K226I | N224Y/K226I | |
| 139/140 | K15Y/G33L/K86G/M95V/V149T/ | K15Y/G33L/K86G/V149T/ | +++ |
| | A154C/G156T/V177P/Y186R/D195G/ | A154C/G156T/Y186R/D195G/ | |
| | K2261/1331W | K226I/I331W | |
| 141/142 | K15Y/M95V/V149R/G156T/V177P/ | K15Y/V149R/G156T/Y186R/ | +++ |
| | Y186R/D195G/N224Y/L317A/I331W | D195G/N224Y/L317A/I331W | |
| 143/144 | K15M/G33L/M95V/V149T/A154C/ | K15M/G33L/V149T/A154C/ | +++ |
| | V177P/D195G/L317A | D195G/L317A | |
| 145/146 | K15M/M95V/V149R/A154C/V177P/ | K15M/V149R/A154C/D195G/ | +++ |
| | D195G/N224Y/L317A | N224Y/L317A | |
| 147/148 | K15Y/M95V/V149R/G156T/V177P/ | K15Y/V149R/G156T/Y186D/ | ++ |
| | Y186D/N224Y/K226I/L317A/I331R | N224Y/K226I/L317A/I331R | |
| 149/150 | K15M/M95V/V149T/A154C/G156T/ | K15M/V149T/A154C/G156T/ | ++ |
| | V177P/Y186D/D195G/I331L | Y186D/D195G/I331L | |
| 151/152 | K15Y/G33L/M95V/V149R/A154C/ | K15Y/G33L/V149R/A154C/ | ++ |
| | G156T/V177P/Y186R/D195G/N224Y/ | G156T/Y186R/D195G/N224Y/ | |
| | K226I/L317A/I331R | K226I/L317A/I331R | |
| 153/154 | M95V/V149R/V177P/D195G/N224Y | V149R/D195G/N224Y | ++ |
| 155/156 | K86G/M95V/V149T/A154C/G156T/ | K86G/V149T/A154C/G156T/ | ++ |
| | V177P/Y186R/D195G/I331L | Y186R/D195G/I331L | |
| 157/158 | K15P/G33L/M95V/V149R/G156T/ | K15P/G33L/V149R/G156T/ | ++ |
| | V177P/D195G/N224Y/L317A/I331L | D195G/N224Y/L317A/I331L | |
| 159/160 | K15P/M95V/V149T/A154C/G156T/ | K15P/V149T/A154C/G156T/Y | ++ |
| | V177P/Y186D/D195G/L317A/I331L | 186D/D195G/L317A/I331L | |
| 161/162 | K15Y/G33L/M95V/V149T/A154C/G | K15Y/G33L/V149T/A154C/G | ++ |
| | 156T/V177P/Y186D/N224Y/I331L | 156T/Y186D/N224Y/I331L | |
| 163/164 | K15P/M95V/V149R/G156T/V177P/ | K15P/V149R/G156T/Y186R/ | ++ |
| | Y186R/D195G/N224Y/L317A/I331W | D195G/N224Y/L317A/I331W | |
| 165/166 | K15Y/M95V/V149R/A154C/G156T/ | K15Y/V149R/A154C/G156T/ | ++ |
| | V177P/D195G/N224Y | D195G/N224Y | |
| 167/168 | K15M/M95V/V149T/A154C/G156T/ | K15M/V149T/A154C/G156T/ | ++ |
| | V177P/D195G/N224Y/K226I | D195G/N224Y/K226I | |
| 169/170 | K15E/M95V/V149R/A154C/G156T/ | K15E/V149R/A154C/G156T/ | ++ |
| | V177P/Y186R/D195G/N224Y/L317A | Y186R/D195G/N224Y/L317A | |
| 171/172 | G33L/M95V/V149T/G156T/V177P/ | G33L/V149T/G156T/Y186R/ | ++ |
| | Y186R/N224Y/I331L | N224Y/I331L | |
| 173/174 | K15Y/G33L/K86G/M95V/V149R/ | K15Y/G33L/K86G/V149R/ | ++ |
| | V177P/D195G/N224Y/I331W | D195G/N224Y/I331W | |
| 175/176 | K15E/K86G/M95V/V149R/A154C/ | K15E/K86G/V149R/A154C/ | + |
| | G156T/V177P/Y186R/D195G/I331W | G156T/Y186R/D195G/I331W | |
| 177/178 | M95V/V149R/V177P/Y186R/D195G/ | V149R/Y186R/D195G/I331W | + |
| | I331W | | |
| 179/180 | K15E/M95V/A154C/G156T/V177P/ | K15E/A154C/G156T/Y186D/ | + |
| | Y186D/K226I/I331R | K226I/I331R | |
| 181/182 | K15Y/M95V/V149T/A154C/V177P/ | K15Y/V149T/A154C/Y186R/ | + |
| | Y186R/D195G/N224Y/K226I | D195G/N224Y/K226I | |
| 183/184 | K15P/M95V/V149R/A154C/G156T/ | K15P/V149R/A154C/G156T/ | + |
| | V177P/D195G/N224Y/I331W | D195G/N224Y/I331W | |
| 185/186 | K15E/G33L/M95V/V149R/A154C/ | K15E/G33L/V149R/A154C/ | + |
| | G156T/V177P/D195G/L317A/I331L | G156T/D195G/L317A/I331L | |
| 187/188 | K15E/G33L/M95V/A154C/G156T/ | K15E/G33L/A154C/G156T/ | + |
| | V177P/Y186R/D195G/N224Y/L317A/ | Y186R/D195G/N224Y/L317A/ | |
| | I331L | I331L | |
| 189/190 | K15P/M95V/V149R/V177P/Y186D/ | K15P/V149R/Y186D/D195G/ | + |
| | D195G/N224Y/I331L | N224Y/I331L | |
| 191/192 | K15P/G33L/M95V/V149R/A154C/ | K15P/G33L/V149R/A154C/ | + |
| | G156T/V177P/D195G/N224Y/I331W | G156T/D195G/N224Y/I331W | |
| 193/194 | K15P/M95V/V149T/A154C/G156T/ | K15P/V149T/A154C/G156T/ | + |
| | V177P/N224Y/K226I/L317A/I331W | N224Y/K226I/L317A/I331W | |
| 195/196 | K15P/G33L/M95V/V149T/G156T/ | K15P/G33L/V149T/G156T/ | + |
| | V177P/D195G/I331W | D195G/I331W | |
| 197/198 | K15P/M95V/V149T/A154C/G156T/ | K15P/V149T/A154C/G156T/ | + |
| | V177P/Y186D/N224Y/K226I/I331L | Y186D/N224Y/K226I/I331L | |
| 199/200 | M95V/A154C/G156T/V177P/D195G/ | A154C/G156T/D195G/N224Y/ | + |
| | N224Y/K226I | K226I | |
| 201/202 | K15Y/G33L/K86G/M95V/V149R/ | K15Y/G33L/K86G/V149R/ | + |
| | A154C/G156T/V177P/Y186D/D195G/ | A154C/G156T/Y186D/D195G/ | |
| | N224Y/L317A/I331W | N224Y/L317A/I331W | |
| 203/204 | K15Y/M95V/V149R/A154C/G156T/ | K15Y/V149R/A154C/G156T/ | + |
| | V177P/Y186R/D195G/N224Y/K226I | Y186R/D195G/N224Y/K226I | |
| 205/206 | K15P/G33L/M95V/V149R/V177P/ | K15P/G33L/V149R/D195G/ | + |
| | D195G/L317A/I331L | L317A/I331L | |
| 207/208 | K15E/M95V/V149T/A154C/V177P/ | K15E/V149T/A154C/N224Y/ | + |
| | N224Y/I331R | I331R | |
| 209/210 | M95V/V149T/A154C/G156T/V177P/ | V149T/A154C/G156T/D195G/ | + |
| | D195G/N224Y/K226I/I331R | N224Y/K226I/I331R | |
| 211/212 | K15M/M95V/V149R/A154C/V177P/ | K15M/V149R/A154C/D195G/ | + |
| | D195G/I331L | I331L | |
| 213/214 | K15Y/M95V/V149R/A154C/G156T/ | K15Y/V149R/A154C/G156T/ | + |
| | V177P/Y186R/D195G | Y186R/D195G | |
| 215/216 | K15E/M95V/V149T/A154C/G156T/ | K15E/V149T/A154C/G156T/ | + |
| | V177P/Y186R/D195G/I331R | Y186R/D195G/I331R | |
| 217/218 | K15M/G33L/M95V/V149T/A154C/ | K15M/G33L/V149T/A154C/ | + |
| | G156T/V177P/Y186R/D195G | G156T/Y186R/D195G | |
| 219/220 | K15P/G33L/K86G/M95V/V149R/ | K15P/G33L/K86G/V149R/ | + |
| | A154C/V177P/D195G/N224Y/L317A/ | A154C/D195G/N224Y/L317A/ | |
| | I331R | I331R | |
| 221/222 | M95V/V149R/V177P/Y186D/D195G/ | V149R/Y186D/D195G/N224Y/ | + |
| | N224Y/K226I/I331R | K226I/I331R | |

Levels of increased activity were determined relative to the reference polypeptide of SEQ ID NO: 128 and defined as follows: “+” 18.99 to 22.90 (first 50%), “++” > 22.90 (next 30%), “+++” > 25.50 (top 20%)

### Example 8

### Improvements Over SEQ ID NO: 128 in RNA Ligase 2 Activity

[0399] SEQ ID NO: 128 was selected as the parent enzyme after screening variants as described in Example 5 above, lop variants were selected from Example 7 above to test again under another condition. Libraries of engineered genes were produced using established techniques (e.g., saturation mutagenesis, recombination of previously identified beneficial mutations). The polypeptides encoded by each gene were produced in HIP as described in Example 1 and the cell paste was generated as described in Example 2.

[0400] To prepare cells for lysis, 300 μl of 0.1 mg/mL lysozyme in 50 mM Tris-HCl buffer at pH 7.5 was added to the cell paste of each sample. After thorough resuspension, the cells were incubated at 45° C. for 1 hour in a PCR thermocycler. The samples were then centrifuged for 10 minutes at 4000 rpm and 4° C. and the clear supernatants used in subsequent biocatalytic reactions.

[0401] To screen, 20% (v/v) lysate was transferred into reactions containing 50 mM Tris-HCl buffer at pH 7.5, 2 mM MgCl₂, 1 mM DTT, 0.4 mM ATP, and 0.4 mM of an equimolar mixture of the fragments compromising Reaction 1 (sense strands 1, 4, and 5, and antisense strands 1-2). The reactions were mixed before being incubated for 16 hours at 37° C. in a PCR thermocycler. Afterwards, EDTA was added to each reaction to a final concentration of 18.3 mM and the samples analyzed via UPLC to quantify the remaining fragment concentrations and product yields.

[0402] Using peak area from Analytical method 13.1, the % conversion for each sample was calculated as shown here:

$$\% conversion = \frac{area under the curve for all products}{\begin{matrix}Total area under the curve for all \\ products and remaining fragments\end{matrix}} * 100$$

[0403] Activity relative to SEQ ID NO: 128 (FIOP) was calculated as the % conversion formed by the variant over % conversion of SEQ ID NO: 128 and shown in Table 8.1.

TABLE 8.1
Relative to SEQ ID NO: 128

| SEQ | Amino Acid | Amino Acid | FIOP |
|---|---|---|---|
| ID | Differences | Differences | Relative to |
| NO: | (Relative to | (Relative to | SEQ ID |
| (nt/aa) | SEQ ID NO: 14) | SEQ ID NO: 128) | NO: 128 |
| 209/210 | M95V/V149T/A154C/G156T/V177P/ | V149T/A154C/G156T/D195G/ | +++ |
| | D195G/N224Y/K226I/I331R | N224Y/K226I/I331R | |
| 151/152 | K15Y/G33L/M95V/V149R/A154C/ | K15Y/G33L/V149R/A154C/G156T/ | +++ |
| | G156T/V177P/Y186R/D195G/ | Y186R/D195G/N224Y/K226I/ | |
| | N224Y/K226I/L317A/I331R | L317A/I331R | |
| 201/202 | K15Y/G33L/K86G/M95V/V149R/ | K15Y/G33L/K86G/V149R/A154C/ | +++ |
| | A154C/G156T/V177P/Y186D/ | G156T/Y186D/D195G/N224Y/ | |
| | D195G/N224Y/L317A/I331W | L317A/I331W | |
| 131/132 | M95V/V149R/A154C/V177P/ | V149R/A154C/Y186D/D195G/ | +++ |
| | Y186D/D195G/N224Y/L317A/I331R | N224Y/L317A/I331R | |
| 135/136 | M95V/V149R/G156T/V177P/ | V149R/G156T/Y186R/D195G/ | +++ |
| | Y186R/D195G/N224Y/K226I/L317A | N224Y/K226I/L317A | |
| 163/164 | K15P/M95V/V149R/G156T/ | K15P/V149R/G156T/Y186R/ | +++ |
| | V177P/Y186R/D195G/N224Y/ | D195G/N224Y/L317A/I331W | |
| | L317A/I331W | | |
| 203/204 | K15Y/M95V/V149R/A154C/G156T/ | K15Y/V149R/A154C/G156T/ | +++ |
| | V177P/Y186R/D195G/N224Y/ | Y186R/D195G/N224Y/K226I | |
| | K226I | | |
| 221/222 | M95V/V149R/V177P/Y186D/ | V149R/Y186D/D195G/N224Y/ | +++ |
| | D195G/N224Y/K226I/I331R | K226I/I331R | |
| 129/130 | K15M/M95V/V149R/A154C/G156T/ | K15M/V149R/A154C/G156T/ | +++ |
| | V177P/Y186R/D195G/I331R | Y186R/D195G/I331R | |
| 181/182 | K15Y/M95V/V149T/A154C/V177P/ | K15Y/V149T/A154C/Y186R/ | ++ |
| | Y186R/D195G/N224Y/K226I | D195G/N224Y/K226I | |
| 157/158 | K15P/G33L/M95V/V149R/G156T/ | K15P/G33L/V149R/G156T/ | ++ |
| | V177P/D195G/N224Y/L317A/ | D195G/N224Y/L317A/I331L | |
| | I331L | | |
| 141/142 | K15Y/M95V/V149R/G156T/ | K15Y/V149R/G156T/Y186R/ | ++ |
| | V177P/Y186R/D195G/N224Y/ | D195G/N224Y/L317A/I331W | |
| | L317A/I331W | | |
| 167/168 | K15M/M95V/V149T/A154C/G156T/ | K15M/V149T/A154C/G156T/ | ++ |
| | V177P/D195G/N224Y/K226I | D195G/N224Y/K226I | |
| 215/216 | K15E/M95V/V149T/A154C/G156T/ | K15E/V149T/A154C/G156T/ | ++ |
| | V177P/Y186R/D195G/I331R | Y186R/D195G/I331R | |
| 183/184 | K15P/M95V/V149R/A154C/G156T/ | K15P/V149R/A154C/G156T/ | ++ |
| | V177P/D195G/N224Y/I331W | D195G/N224Y/I331W | |
| 169/170 | K15E/M95V/V149R/A154C/G156T/ | K15E/V149R/A154C/G156T/ | ++ |
| | V177P/Y186R/D195G/N224Y/ | Y186R/D195G/N224Y/L317A | |
| | L317A | | |
| 165/166 | K15Y/M95V/V149R/A154C/G156T/ | K15Y/V149R/A154C/G156T/ | ++ |
| | V177P/D195G/N224Y | D195G/N224Y | |
| 159/160 | K15P/M95V/V149T/A154C/G156T/ | K15P/V149T/A154C/G156T/ | ++ |
| | V177P/Y186D/D195G/L317A/ | Y186D/D195G/L317A/I331L | |
| | I331L | | |
| 149/150 | K15M/M95V/V149T/A154C/ | K15M/V149T/A154C/G156T/ | ++ |
| | G156T/V177P/Y186D/D195G/I331L | Y186D/D195G/I331L | |
| 217/218 | K15M/G33L/M95V/V149T/A154C/ | K15M/G33L/V149T/A154C/ | ++ |
| | G156T/V177P/Y186R/D195G | G156T/Y186R/D195G | |
| 213/214 | K15Y/M95V/V149R/A154C/ | K15Y/V149R/A154C/G156T/Y186R/ | ++ |
| | G156T/V177P/Y186R/D195G | D195G | |
| 137/138 | K15Y/M95V/V149R/G156T/ | K15Y/V149R/G156T/D195G/N224Y/ | ++ |
| | V177P/D195G/N224Y/K226I | K226I | |
| 219/220 | K15P/G33L/K86G/M95V/V149R/ | K15P/G33L/K86G/V149R/A154C/ | ++ |
| | A154C/V177P/D195G/N224Y/ | D195G/N224Y/L317A/I331R | |
| | L317A/I331R | | |
| 191/192 | K15P/G33L/M95V/V149R/A154C/ | K15P/G33L/V149R/A154C/G156T/ | + |
| | G156T/V177P/D195G/N224Y/ | D195G/N224Y/I331W | |
| | I331W | | |
| 189/190 | K15P/M95V/V149R/V177P/ | K15P/V149R/Y186D/D195G/N224Y/ | + |
| | Y186D/D195G/N224Y/I331L | I331L | |
| 133/134 | K15M/G33L/M95V/V149T/ | K15M/G33L/V149T/A154C/Y186R/ | + |
| | A154C/V177P/Y186R/D195G | D195G | |
| 161/162 | K15Y/G33L/M95V/V149T/A154C/ | K15Y/G33L/V149T/A154C/G156T/ | + |
| | G156T/V177P/Y186D/N224Y/ | Y186D/N224Y/I331L | |
| | I331L | | |
| 185/186 | K15E/G33L/M95V/V149R/A154C/ | K15E/G33L/V149R/A154C/G156T/ | + |
| | G156T/V177P/D195G/L317A/ | D195G/L317A/I331L | |
| | I331L | | |
| 139/140 | K15Y/G33L/K86G/M95V/V149T/ | K15Y/G33L/K86G/V149T/A154C/ | + |
| | A154C/G156T/V177P/Y186R/ | G156T/Y186R/D195G/K226I/I331W | |
| | D195G/K226I/I331W | | |
| 177/178 | M95V/V149R/V177P/Y186R/ | V149R/Y186R/D195G/I331W | + |
| | D195G/I331W | | |
| 143/144 | K15M/G33L/M95V/V149T/ | K15M/G33L/V149T/A154C/ | + |
| | A154C/V177P/D195G/L317A | D195G/L317A | |
| 187/188 | K15E/G33L/M95V/A154C/G156T/ | K15E/G33L/A154C/G156T/ | + |
| | V177P/Y186R/D195G/N224Y/ | Y186R/D195G/N224Y/L317A/I331L | |
| | L317A/I331L | | |
| 145/146 | K15M/M95V/V149R/A154C/ | K15M/V149R/A154C/D195G/ | + |
| | V177P/D195G/N224Y/L317A | N224Y/L317A | |
| 147/148 | K15Y/M95V/V149R/G156T/V177P/ | K15Y/V149R/G156T/Y186D/ | + |
| | Y186D/N224Y/K226I/L317A/ | N224Y/K226I/L317A/I331R | |
| | I331R | | |
| 195/196 | K15P/G33L/M95V/V149T/G156T/ | K15P/G33L/V149T/G156T/D195G/ | + |
| | V177P/D195G/I331W | I331W | |
| 153/154 | M95V/V149R/V177P/D195G/ | V149R/D195G/N224Y | + |
| | N224Y | | |
| 211/212 | K15M/M95V/V149R/A154C/ | K15M/V149R/A154C/D195G/I331L | + |
| | V177P/D195G/I331L | | |
| 193/194 | K15P/M95V/V149T/A154C/G156T/ | K15P/V149T/A154C/G156T/N224Y/ | + |
| | V177P/N224Y/K226I/L317A/ | K226I/L317A/I331W | |
| | I331W | | |
| 197/198 | K15P/M95V/V149T/A154C/G156T/ | K15P/V149T/A154C/G156T/Y186D/ | + |
| | V177P/Y186D/N224Y/K226I/ | N224Y/K226I/I331L | |
| | I331L | | |
| 171/172 | G33L/M95V/V149T/G156T/ | G33L/V149T/G156T/Y186R/ | + |
| | V177P/Y186R/N224Y/I331L | N224Y/I331L | |
| 155/156 | K86G/M95V/V149T/A154C/G156T/ | K86G/V149T/A154C/G156T/ | + |
| | V177P/Y186R/D195G/I331L | Y186R/D195G/I331L | |
| 199/200 | M95V/A154C/G156T/V177P/ | A154C/G156T/D195G/N224Y/ | + |
| | D195G/N224Y/K226I | K226I | |
| 173/174 | K15Y/G33L/K86G/M95V/V149R/ | K15Y/G33L/K86G/V149R/D195G/ | + |
| | V177P/D195G/N224Y/I331W | N224Y/I331W | |
| 205/206 | K15P/G33L/M95V/V149R/V177P/ | K15P/G33L/V149R/D195G/L317A/ | + |
| | D195G/L317A/I331L | I331L | |
| 175/176 | K15E/K86G/M95V/V149R/A154C/ | K15E/K86G/V149R/A154C/G156T/ | + |
| | G156T/V177P/Y186R/D195G/ | Y186R/D195G/I331W | |
| | I331W | | |
| 207/208 | K15E/M95V/V149T/A154C/ | K15E/V149T/A154C/N224Y/I331R | + |
| | V177P/N224Y/I331R | | |
| 179/180 | K15E/M95V/A154C/G156T/V177P/ | K15E/A154C/G156T/Y186D/K226I/ | + |
| | Y186D/K226I/I331R | I331R | |

Levels of increased activity were determined relative to the reference polypeptide of SEQ ID NO: 128 and defined as follows: “+” 11.21 to 19.80 (first 50%), “++” > 19.80 (next 30%), “+++” > 20.97 (top 20%)

### Example 9

### Improvements Over SEQ ID NO: 128 in RNA Ligase 2 Activity

[0404] The same samples from Example 8 were tested again, but with Reaction 3. To screen, 20%(v/v) lysate was transferred into reactions containing 50 mM Tris-HCl buffer at pH 7.5, 2 mM MgCl₂, 1 mM DTT, 0.4 mM ATP, and 0.4 mM of an equimolar mixture of the fragments compromising Reaction 3 (sense strands 1, 4 and 5, and antisense strands 2-4). The reactions were mixed before being incubated for 16 hours at 37° C. in a PCR thermocycler. Afterwards, EDTA was added to each reaction to a final concentration of 18.3 mM and the samples analyzed via UPLC to quantify the remaining fragment concentrations and product yields.

[0405] Using peak area from Analytical method 13.1, the % conversion for each sample was calculated as shown here:

$$\% conversion = \frac{area under the curve for all products}{\begin{matrix}Total area under the curve for all \\ products and remaining fragments\end{matrix}} * 100$$

[0406] Activity relative to SEQ ID NO: 128 (FIOP) was calculated as the % conversion formed by the variant over % conversion of SEQ ID NO: 128 and shown in Table 9.1.

TABLE 9.1
Relative to SEQ ID NO: 128

| SEQ | Amino Acid | Amino Acid | FIOP |
|---|---|---|---|
| ID | Differences | Differences | Relative to |
| NO: | (Relative to | (Relative to | SEQ ID |
| (nt/aa) | SEQ ID NO: 14) | SEQ ID NO: 40 and 128) | NO: 128 |
| 163/164 | K15P/M95V/V149R/G156T/V177P/ | K15P/V149R/G156T/Y186R/ | +++ |
| | Y186R/D195G/N224Y/L317A/I331W | D195G/N224Y/L317A/I331W | |
| 203/204 | K15Y/M95V/V149R/A154C/G156T/ | K15Y/V149R/A154C/G156T/ | +++ |
| | V177P/Y186R/D195G/N224Y/K226I | Y186R/D195G/N224Y/K226I | |
| 141/142 | K15Y/M95V/V149R/G156T/V177P/ | K15Y/V149R/G156T/Y186R/ | +++ |
| | Y186R/D195G/N224Y/L317A/I331W | D195G/N224Y/L317A/I331W | |
| 131/132 | M95V/V149R/A154C/V177P/Y186D/ | V149R/A154C/Y186D/D195G/ | +++ |
| | D195G/N224Y/L317A/I331R | N224Y/L317A/I331R | |
| 169/170 | K15E/M95V/V149R/A154C/G156T/ | K15E/V149R/A154C/G156T/ | +++ |
| | V177P/Y186R/D195G/N224Y/L317A | Y186R/D195G/N224Y/L317A | |
| 201/202 | K15Y/G33L/K86G/M95V/V149R/ | K15Y/G33L/K86G/V149R/ | +++ |
| | A154C/G156T/V177P/Y186D/D195G/ | A154C/G156T/Y186D/D195G/ | |
| | N224Y/L317A/I331W | N224Y/L317A/I331W | |
| 191/192 | K15P/G33L/M95V/V149R/A154C/ | K15P/G33L/V149R/A154C/ | +++ |
| | G156T/V177P/D195G/N224Y/I331W | G156T/D195G/N224Y/I331W | |
| 183/184 | K15P/M95V/V149R/A154C/G156T/ | K15P/V149R/A154C/G156T/ | +++ |
| | V177P/D195G/N224Y/I331W | D195G/N224Y/I331W | |
| 157/158 | K15P/G33L/M95V/V149R/G156T/ | K15P/G33L/V149R/G156T/ | +++ |
| | V177P/D195G/N224Y/L317A/I331L | D195G/N224Y/L317A/I331L | |
| 219/220 | K15P/G33L/K86G/M95V/V149R/A154C/ | K15P/G33L/K86G/V149R/ | ++ |
| | V177P/D195G/N224Y/L317A/I331R | A154C/D195G/N224Y/L317A/I331R | |
| 151/152 | K15Y/G33L/M95V/V149R/A154C/ | K15Y/G33L/V149R/A154C/ | ++ |
| | G156T/V177P/Y186R/D195G/N224Y/ | G156T/Y186R/D195G/N224Y/ | |
| | K226I/L317A/I331R | K226I/L317A/I331R | |
| 167/168 | K15M/M95V/V149T/A154C/G156T/ | K15M/V149T/A154C/G156T/ | ++ |
| | V177P/D195G/N224Y/K226I | D195G/N224Y/K226I | |
| 129/130 | K15M/M95V/V149R/A154C/G156T/ | K15M/V149R/A154C/G156T/ | ++ |
| | V177P/Y186R/D195G/I331R | Y186R/D195G/I331R | |
| 221/222 | M95V/V149R/V177P/Y186D/D195G/ | V149R/Y186D/D195G/N224Y/ | ++ |
| | N224Y/K226I/I331R | K226I/I331R | |
| 189/190 | K15P/M95V/V149R/V177P/Y186D/ | K15P/V149R/Y186D/D195G/ | ++ |
| | D195G/N224Y/I331L | N224Y/I331L | |
| 181/182 | K15Y/M95V/V149T/A154C/V177P/ | K15Y/V149T/A154C/Y186R/ | ++ |
| | Y186R/D195G/N224Y/K226I | D195G/N224Y/K226I | |
| 165/166 | K15Y/M95V/V149R/A154C/G156T/ | K15Y/V149R/A154C/G156T/ | ++ |
| | V177P/D195G/N224Y | D195G/N224Y | |
| 159/160 | K15P/M95V/V149T/A154C/G156T/ | K15P/V149T/A154C/G156T/ | ++ |
| | V177P/Y186D/D195G/L317A/I331L | Y186D/D195G/L317A/I331L | |
| 135/136 | M95V/V149R/G156T/V177P/Y186R/ | V149R/G156T/Y186R/D195G/ | ++ |
| | D195G/N224Y/K226I/L317A | N224Y/K226I/L317A | |
| 209/210 | M95V/V149T/A154C/G156T/V177P/ | V149T/A154C/G156T/D195G/ | ++ |
| | D195G/N224Y/K226I/I331R | N224Y/K226I/I331R | |
| 217/218 | K15M/G33L/M95V/V149T/A154C/ | K15M/G33L/V149T/A154C/ | ++ |
| | G156T/V177P/Y186R/D195G | G156T/Y186R/D195G | |
| 197/198 | K15P/M95V/V149T/A154C/G156T/ | K15P/V149T/A154C/G156T/ | ++ |
| | V177P/Y186D/N224Y/K226I/I331L | Y186D/N224Y/K226I/I331L | |
| 193/194 | K15P/M95V/V149T/A154C/G156T/ | K15P/V149T/A154C/G156T/ | ++ |
| | V177P/N224Y/K226I/L317A/I331W | N224Y/K226I/L317A/I331W | |
| 149/150 | K15M/M95V/V149T/A154C/G156T/ | K15M/V149T/A154C/G156T/ | + |
| | V177P/Y186D/D195G/I331L | Y186D/D195G/I331L | |
| 215/216 | K15E/M95V/V149T/A154C/G156T/ | K15E/V149T/A154C/G156T/ | + |
| | V177P/Y186R/D195G/I331R | Y186R/D195G/I331R | |
| 137/138 | K15Y/M95V/V149R/G156T/V177P/ | K15Y/V149R/G156T/D195G/ | + |
| | D195G/N224Y/K226I | N224Y/K226I | |
| 145/146 | K15M/M95V/V149R/A154C/V177P/ | K15M/V149R/A154C/D195G/ | + |
| | D195G/N224Y/L317A | N224Y/L317A | |
| 139/140 | K15Y/G33L/K86G/M95V/V149T/ | K15Y/G33L/K86G/V149T/ | + |
| | A154C/G156T/V177P/Y186R/D195G/ | A154C/G156T/Y186R/D195G/ | |
| | K226I/I331W | K226I/I331W | |
| 187/188 | K15E/G33L/M95V/A154C/G156T/ | K15E/G33L/A154C/G156T/ | + |
| | V177P/Y186R/D195G/N224Y/L317A/ | Y186R/D195G/N224Y/L317A/ | |
| | I331L | I331L | |
| 153/154 | M95V/V149R/V177P/D195G/N224Y | V149R/D195G/N224Y | + |
| 185/186 | K15E/G33L/M95V/V149R/A154C/ | K15E/G33L/V149R/A154C/ | + |
| | G156T/V177P/D195G/L317A/I331L | G156T/D195G/L317A/I331L | |
| 213/214 | K15Y/M95V/V149R/A154C/G156T/ | K15Y/V149R/A154C/G156T/ | + |
| | V177P/Y186R/D195G | Y186R/D195G | |
| 171/172 | G33L/M95V/V149T/G156T/V177P/ | G33L/V149T/G156T/Y186R/ | + |
| | Y186R/N224Y/I331L | N224Y/I331L | |
| 147/148 | K15Y/M95V/V149R/G156T/V177P/ | K15Y/V149R/G156T/Y186D/ | + |
| | Y186D/N224Y/K226I/L317A/I331R | N224Y/K226I/L317A/I331R | |
| 133/134 | K15M/G33L/M95V/V149T/A154C/ | K15M/G33L/V149T/A154C/ | + |
| | V177P/Y186R/D195G | Y186R/D195G | |
| 173/174 | K15Y/G33L/K86G/M95V/V149R/ | K15Y/G33L/K86G/V149R/ | + |
| | V177P/D195G/N224Y/I331W | D195G/N224Y/I331W | |
| 161/162 | K15Y/G33L/M95V/V149T/A154C/ | K15Y/G33L/V149T/A154C/ | + |
| | G156T/V177P/Y186D/N224Y/I331L | G156T/Y186D/N224Y/I331L | |
| 143/144 | K15M/G33L/M95V/V149T/A154C/ | K15M/G33L/V149T/A154C/ | + |
| | V177P/D195G/L317A | D195G/L317A | |
| 177/178 | M95V/V149R/V177P/Y186R/D195G/ | V149R/Y186R/D195G/I331W | + |
| | I331W | | |
| 155/156 | K86G/M95V/V149T/A154C/G156T/ | K86G/V149T/A154C/G156T/ | + |
| | V177P/Y186R/D195G/I331L | Y186R/D195G/I331L | |
| 199/200 | M95V/A154C/G156T/V177P/D195G/ | A154C/G156T/D195G/N224Y/ | + |
| | N224Y/K226I | K226I | |
| 211/212 | K15M/M95V/V149R/A154C/V177P/ | K15M/V149R/A154C/D195G/ | + |
| | D195G/I331L | I331L | |
| 195/196 | K15P/G33L/M95V/V149T/G156T/ | K15P/G33L/V149T/G156T/ | + |
| | V177P/D195G/I331W | D195G/I331W | |
| 205/206 | K15P/G33L/M95V/V149R/V177P/ | K15P/G33L/V149R/D195G/ | + |
| | D195G/L317A/I331L | L317A/I331L | |
| 207/208 | K15E/M95V/V149T/A154C/V177P/ | K15E/V149T/A154C/N224Y/ | + |
| | N224Y/I331R | I331R | |
| 179/180 | K15E/M95V/A154C/G156T/V177P/ | K15E/A154C/G156T/Y186D/ | + |
| | Y186D/K226I/I331R | K226I/I331R | |
| 175/176 | K15E/K86G/M95V/V149R/A154C/ | K15E/K86G/V149R/A154C/ | + |
| | G156T/V177P/Y186R/D195G/I331W | G156T/Y186R/D195G/I331W | |

Levels of increased activity were determined relative to the reference polypeptide of SEQ ID NO: 128 and defined as follows: “+” 5.65 to 10.38 (first 50%), “++” > 10.38 (next 30%), “+++” > 13.42 (top 20%)

### Example 10

### Improvements Over SEQ ID NO: 204 in RNA Ligase 2 Activity

[0407] SEQ ID NO: 204 was selected as the parent enzyme after screening variants as described in Examples 7-9 above. Libraries of engineered genes were produced using established techniques (e.g., saturation mutagenesis, recombination of previously identified beneficial mutations). The polypeptides encoded by each gene were produced in HIP as described in Example 1 and the cell paste was generated as described in Example 2.

[0408] To prepare cells for lysis, 300 μl of 0.1 mg/mL lysozyme in 50 mM Tris-HCl buffer at pH 7.5 was added to the cell paste of each sample. After thorough resuspension, the cells were incubated at 48° C. for 1 hour in a PCR thermocycler. The samples were then centrifuged for 10 min at 4000 rpm and 4° C. and the clear supernatants used in subsequent biocatalytic reactions.

[0409] To screen, 20%(v/v) lysate was transferred into reactions containing 50 mM Tris-HCl buffer at pH 7.5, 2 mM MgCl₂, 1 mM DTT, 0.4 mM ATP, and 0.4 mM of an equimolar mixture of the fragments compromising Reaction 2 (sense strands 1-3, and antisense strands 1-2). The reactions were mixed before being incubated for 16 hours at 37° C. in a PCR thermocycler. Afterwards, EDTA was added to each reaction to a final concentration of 20.0 mM and the samples analyzed via UPLC to quantify the remaining fragment concentrations and product yields.

[0410] Using peak area from Analytical method 13.1, the % conversion for each sample was calculated as shown here:

$$\% conversion = \frac{area under the curve for all products}{\begin{matrix}Total area under the curve for all \\ products and remaining fragments\end{matrix}} * 100$$

[0411] Activity relative to SEQ ID NO: 204 (FIOP) was calculated as the % conversion formed by the variant over % conversion of SEQ ID NO: 204 and shown in Table 10.1.

TABLE 10.1
Relative to SEQ ID NO: 204

| SEQ | Amino Acid | Amino Acid | FIOP |
|---|---|---|---|
| ID | Differences | Differences | Relative to |
| NO: | (Relative to | (Relative to | SEQ ID |
| (nt/aa) | SEQ ID NO: 14) | SEQ ID NO: 204) | NO: 204 |
| 479/480 | H2E/K15Y/H39S/T69D/M95V/Y144W/ | H2E/H39S/T69D/Y144W/ | +++ |
| | V149R/A154C/G156L/V177P/Y186R/ | T156L/M316L/T330M | |
| | D195G/N224Y/K226I/M316L/T330M | | |
| 481/482 | H2V/K15Y/H39S/T69D/M95V/Q119T/ | H2V/H39S/T69D/Q119T/ | +++ |
| | V149R/A154C/G156T/V177P/N185K/ | N185K/M316L | |
| | Y186R/D195G/N224Y/K226I/M316L | | |
| 483/484 | K15Y/T69D/M95V/V149R/A154C/ | T69D/T212I/K256A/T330M | +++ |
| | G156T/V177P/Y186R/D195G/T212I/ | | |
| | N224Y/K226I/K256A/T330M | | |
| 485/486 | K15Y/H39S/M95V/Q119T/V149R/ | H39S/Q119T/K256A/M316L/ | +++ |
| | A154C/G156T/V177P/Y186R/D195G/ | K326R/T330M | |
| | N224Y/K226I/K256A/M316L/K326R/ | | |
| | T330M | | |
| 487/488 | K15Y/T69D/M95V/G116N/Q119T/ | T69D/G116N/Q119T/N185K/ | +++ |
| | V149R/A154C/G156T/V177P/N185K/ | T330M | |
| | Y186R/D195G/N224Y/K226I/T330M | | |
| 489/490 | H2E/K15Y/H39S/M95V/Q119T/Y144W/ | H2E/H39S/Q119T/Y144W/ | +++ |
| | V149R/A154C/G156N/L159F/V177P/ | T156N/L159F/H202Y/K256A/ | |
| | Y186R/D195G/H202Y/N224Y/K226I/ | M316L/K326R/T330M | |
| | K256A/M316L/K326R/T330M | | |
| 491/492 | K15Y/H81Y/M95V/V149R/A154C/ | H81Y/I183V/N185G/N230D | +++ |
| | G156T/V177P/I183V/N185G/Y186R/ | | |
| | D195G/N224Y/K226I/N230D | | |
| 493/494 | H2V/K15Y/H39S/T69D/M95V/G116N/ | H2V/H39S/T69D/G116N/ | +++ |
| | Y144W/V149R/A154C/G156L/V177P/ | Y144W/T156L/N185K | |
| | N185K/Y186R/D195G/N224Y/K226I | | |
| 495/496 | H2E/A14K/K15Y/H39S/T69D/M95V/ | H2E/A14K/H39S/T69D/ | +++ |
| | G116N/Q119T/V149R/A154C/G156T/ | G116N/Q119T/L159F/N185K/ | |
| | L159F/V177P/N185K/Y186R/D195G/ | K256A/K326R | |
| | N224Y/K226I/K256A/K326R | | |
| 497/498 | H2E/K15Y/M95V/G116N/Q119T/V149R/ | H2E/G116N/Q119T/M316L | +++ |
| | A154C/G156T/V177P/Y186R/D195G/ | | |
| | N224Y/K226I/M316L | | |
| 499/500 | K15Y/M95V/G116N/Q119T/Y144W/V149R/ | G116N/Q119T/Y144W/N185K/ | ++ |
| | A154C/G156T/V177P/N185K/Y186R/ | H314W/M316L | |
| | D195G/N224Y/K226I/H314W/M316L | | |
| 501/502 | K15Y/H39S/T69D/M95V/G116N/Y144W/ | H39S/T69D/G116N/Y144W/ | ++ |
| | V149R/A154C/G156T/V177P/K181D/ | K181D/N185K/K256A/T330M | |
| | N185K/Y186R/D195G/N224Y/K226I/ | | |
| | K256A/T330M | | |
| 503/504 | H2E/K15Y/H39S/T69D/M95V/Q119T/ | H2E/H39S/T69D/Q119T/ | ++ |
| | Y144W/V149R/A154C/G156L/V177P/ | Y144W/T156L/N185K/H314W | |
| | N185K/Y186R/D195G/N224Y/K226I/ | | |
| | H314W | | |
| 505/506 | A14K/K15Y/H39S/T69D/M95V/Y144W/ | A14K/H39S/T69D/Y144W/ | ++ |
| | V149R/A154C/G156N/V177P/Y186R/ | T156N/T212I/K256A/H314W/ | |
| | D195G/T212I/N224Y/K226I/K256A/ | M316L/K326R/T330M | |
| | H314W/M316L/K326R/T330M | | |
| 507/508 | K15Y/H39S/T69D/M95V/Y144W/V149R/ | H39S/T69D/Y144W/T156L/ | ++ |
| | A154C/G156L/V177P/N185K/Y186R/ | N185K/M316L/T330M | |
| | D195G/N224Y/K226I/M316L/T330M | | |
| 509/510 | K15Y/M95V/V149R/A154C/G156Q/V177P/ | T156Q/N185G/Q334R/N335H | ++ |
| | N185G/Y186R/D195G/N224Y/K226I/ | | |
| | Q334R/N335H | | |
| 511/512 | K15Y/H39Q/I63V/M95V/V149R/A154C/ | H39Q/I63V/T156Q/N230D/ | ++ |
| | G156Q/V177P/Y186R/D195G/N224Y/ | V257L/T275N/T330R/N335H | |
| | K226I/N230D/V257L/T275N/T330R/ | | |
| | N335H | | |
| 513/514 | K15Y/M95V/V149R/A154C/G156Q/ | T156Q/V266L/M316L/T330R/ | ++ |
| | V177P/Y186R/D195G/N224Y/K226I/V266L/ | Q334R/N335H | |
| | M316L/T330R/Q334R/N335H | | |
| 515/516 | K15Y/H39Q/I63V/M95V/V149R/A154C/ | H39Q/I63V/T156Q/I183V/ | ++ |
| | G156Q/V177P/I183V/N185G/Y186R/ | N185G/N230D/T330R/Q334R | |
| | D195G/N224Y/K226I/N230D/T330R/ | | |
| | Q334R | | |
| 517/518 | K15Y/T69D/M95V/Y144W/V149R/ | T69D/Y144W/M316L | ++ |
| | A154C/G156T/V177P/Y186R/D195G/ | | |
| | N224Y/K226I/M316L | | |
| 519/520 | K15Y/M95V/G116N/Q119T/V149R/ | G116N/Q119T/T156L/H202Y/ | ++ |
| | A154C/G156L/V177P/Y186R/D195G/ | T212I/K326R/T330M | |
| | H202Y/T212I/N224Y/K226I/K326R/T330M | | |
| 521/522 | K15Y/H39S/T69D/M95V/Q119T/S138R/ | H39S/T69D/Q119T/S138R/ | ++ |
| | V149R/A154C/G156T/V177P/K181D/ | K181D/N185K/M316L/K326R | |
| | N185K/Y186R/D195G/N224Y/K226I/ | | |
| | M316L/K326R | | |
| 523/524 | K15Y/H39Q/H81Y/M95V/V149R/ | H39Q/H81Y/T156Q/N230D | ++ |
| | A154C/G156Q/V177P/Y186R/D195G/ | | |
| | N224Y/K226I/N230D | | |
| 525/526 | H2V/A14K/K15Y/T69D/M95V/G116N/ | H2V/A14K/T69D/G116N/ | ++ |
| | Q119T/Y144W/V149R/A154C/G156T/ | Q119T/Y144W/L159F/K326R/ | |
| | L159F/V177P/Y186R/D195G/N224Y/ | T330M | |
| | K226I/K326R/T330M | | |
| 527/528 | K15Y/H39Q/M95V/V149R/A154C/ | H39Q/T156A/Q334R/L345V | ++ |
| | G156A/V177P/Y186R/D195G/N224Y/ | | |
| | K226I/Q334R/L345V | | |
| 529/530 | K15Y/M95V/V149R/A154C/G156T/ | N230D/V266L/Q334R | ++ |
| | V177P/Y186R/D195G/N224Y/K226I/ | | |
| | N230D/V266L/Q334R | | |
| 531/532 | H2V/K15Y/M95V/G116N/Y144W/ | H2V/G116N/Y144W/T156L/ | + |
| | V149R/A154C/G156L/L159F/V177P/ | L159F | |
| | Y186R/D195G/N224Y/K226I | | |
| 533/534 | K15Y/M95V/V149R/A154C/G156A/V177P/ | T156A/I183V/N185G/N230D | + |
| | I183V/N185G/Y186R/D195G/N224Y/ | | |
| | K226I/N230D | | |
| 535/536 | H2E/A14K/K15Y/M95V/G116N/V149R/ | H2E/A14K/G116N/M316L/ | + |
| | A154C/G156T/V177P/Y186R/D195G/ | K326R/T330M | |
| | N224Y/K226I/M316L/K326R/T330M | | |
| 537/538 | K15Y/H39Q/I63V/M95V/V149R/A154C/ | H39Q/I63V/T156A/N230D/ | + |
| | G156A/V177P/Y186R/D195G/N224Y/ | M316L/L345V | |
| | K226I/N230D/M316L/L345V | | |
| 539/540 | K15Y/T69D/M95V/S138R/Y144W/V149R/ | T69D/S138R/Y144W/L159F/ | + |
| | A154C/G156T/L159F/V177P/N185K/ | N185K/H202Y/M316L | |
| | Y186R/D195G/H202Y/N224Y/K226I/ | | |
| | M316L | | |
| 541/542 | K15Y/H39Q/M95V/V149R/A154C/G156Q/ | H39Q/T156Q/V257L/V266L/ | + |
| | V177P/Y186R/D195G/N224Y/K226I/ | M316L/Q334R | |
| | V257L/V266L/M316L/Q334R | | |
| 543/544 | K15Y/M95V/V149R/A154C/G156Q/ | T156Q/V257L/T275N/Q334R | + |
| | V177P/Y186R/D195G/N224Y/K226I/ | | |
| | V257L/T275N/Q334R | | |
| 545/546 | K15Y/M95V/V149R/A154C/G156T/ | I183V | + |
| | V177P/I183V/Y186R/D195G/N224Y/K226I | | |
| 547/548 | K15Y/K89W/M95V/V149R/A154C/G156A/ | K89W/T156A/N185G/N230D/ | + |
| | V177P/N185G/Y186R/D195G/N224Y/ | M316L/L345V | |
| | K226I/N230D/M316L/L345V | | |
| 549/550 | H2E/A14K/K15Y/M95V/Q119T/V149R/ | H2E/A14K/Q119T | + |
| | A154C/G156T/V177P/Y186R/D195G/ | | |
| | N224Y/K226I | | |
| 551/552 | K15Y/M95V/Y144W/V149R/A154C/G156L/ | Y144W/T156L/M316L/T330M | + |
| | V177P/Y186R/D195G/N224Y/K226I/ | | |
| | M316L/T330M | | |
| 553/554 | K15Y/H39Q/H81Y/M95V/V149R/A154C/ | H39Q/H81Y/N185G/M316L/ | + |
| | G156T/V177P/N185G/Y186R/D195G/ | Q334R | |
| | N224Y/K226I/M316L/Q334R | | |
| 555/556 | K15Y/K89H/M95V/V149R/A154C/G156T/ | K89H/N230D/V266L/L345V | + |
| | V177P/Y186R/D195G/N224Y/K226I/ | | |
| | N230D/V266L/L345V | | |
| 557/558 | K15Y/H39Q/M95V/V149R/A154C/G156Q/ | H39Q/T156Q/N230D/T275N/ | + |
| | V177P/Y186R/D195G/N224Y/K226I/ | M316L | |
| | N230D/T275N/M316L | | |
| 559/560 | K15Y/H39Q/M95V/V149R/A154C/G156Q/ | H39Q/T156Q/N230D/V266L/ | + |
| | V177P/Y186R/D195G/N224Y/K226I/ | Q334R/N335H | |
| | N230D/V266L/Q334R/N335H | | |
| 561/562 | K15Y/M95V/V149R/A154C/G156Q/V177P/ | T156Q/N185G/T275N/M316L/ | + |
| | N185G/Y186R/D195G/N224Y/K226I/ | T330R | |
| | T275N/M316L/T330R | | |
| 563/564 | K15Y/M95V/Q119T/V149R/A154C/G156N/ | Q119T/T156N/H202Y | + |
| | V177P/Y186R/D195G/H202Y/N224Y/ | | |
| | K226I | | |
| 565/566 | K15Y/M95V/V149R/A154C/G156T/V177P/ | N230D/V257L/T275N/M316L/ | + |
| | Y186R/D195G/N224Y/K226I/N230D/ | T330R/L345V | |
| | V257L/T275N/M316L/T330R/L345V | | |
| 567/568 | K15Y/M95V/V149R/A154C/G156T/ | N230D | + |
| | V177P/Y186R/D195G/N224Y/K226I/N230D | | |
| 569/570 | K15Y/H81Y/M95V/V149R/A154C/G156Q/ | H81Y/T156Q/T330R/N335H/ | + |
| | V177P/Y186R/D195G/N224Y/K226I/ | L345V | |
| | T330R/N335H/L345V | | |
| 571/572 | K15Y/M95V/V149R/A154C/G156A/ | T156A/I183V/N230D/V266L | + |
| | V177P/I183V/Y186R/D195G/N224Y/K226I/ | | |
| | N230D/V266L | | |
| 573/574 | K15Y/H39S/M95V/V149R/A154C/G156T/ | H39S/N185K | + |
| | V177P/N185K/Y186R/D195G/N224Y/ | | |
| | K226I | | |
| 575/576 | K15Y/H39Q/H81Y/M95V/V149R/A154C/ | H39Q/H81Y/I183V/T275N/ | + |
| | G156T/V177P/I183V/Y186R/D195G/ | M316L/Q334R/L345V | |
| | N224Y/K226I/T275N/M316L/Q334R/ | | |
| | L345V | | |
| 577/578 | K15Y/M95V/V149R/A154C/G156A/V177P/ | T156A/N230D/V257L/M316L | + |
| | Y186R/D195G/N224Y/K226I/N230D/ | | |
| | V257L/M316L | | |
| 579/580 | K15Y/H39S/M95V/G116N/V149R/A154C/ | H39S/G116N/T156N | + |
| | G156N/V177P/Y186R/D195G/N224Y/ | | |
| | K226I | | |
| 581/582 | K15Y/M95V/V149R/A154C/G156T/V177P/ | I183V/N185G/V257L/T275N/ | + |
| | I183V/N185G/Y186R/D195G/N224Y/ | M316L/T330R/Q334R | |
| | K226I/V257L/T275N/M316L/T330R/ | | |
| | Q334R | | |

Levels of increased activity were determined relative to the reference polypeptide of SEQ ID NO: 204 and defined as follows: “+” 1.75 to 2.02 (first 50%), “++” > 2.02 (next 30%), “+++” > 2.48 (top 20%)

### Example 11

### Improvements Over SEQ ID NO: 204 in RNA Ligase 2 Activity

[0412] SEQ ID NO: 204 was selected as the parent enzyme after screening variants as described in Examples 7-9 above, lop variants were selected from Example 10 above to test again under another condition.

[0413] Libraries of engineered genes were produced using established techniques (e.g., saturation mutagenesis, recombination of previously identified beneficial mutations). The polypeptides encoded by each gene were produced in HIP as described in Example 1 and the cell paste was generated as described in Example 2.

[0414] To prepare cells for lysis, 300 μl of 0.1 mg/mL lysozyme in 50 mM Tris-HCl buffer at pH 7.5 was added to the cell paste of each sample. After thorough resuspension, the cells were incubated at 48° C. for 1 hr in a PCR thermocycler. The samples were then centrifuged for 10 min at 4000 rpm and 4° C. and the clear supernatants used in subsequent biocatalytic reactions.

[0415] To screen, 20%(v/v) lysate was transferred into reactions containing 50 mM Tris-HCl buffer at pH 7.5, 2 mM MgCl₂, 1 mM DTT, 0.4 mM ATP, and 3 mM of an equimolar mixture of the fragments compromising Reaction 2 (sense strands 1-3, and antisense strands 1-2). The reactions were mixed before being incubated for 16 hours at 37° C. in a PCR thermocycler. Afterwards, EDTA was added to each reaction to a final concentration of 20 mM and the samples analyzed via UPLC to quantify the remaining fragment concentrations and product yields.

[0416] Using peak area from Analytical method 13. 1, the % conversion for each sample was calculated as shown here:

$$\% conversion = \frac{area under the curve for all products}{\begin{matrix}Total area under the curve for all \\ products and remaining fragments\end{matrix}} * 100$$

[0417] Activity relative to SEQ ID NO: 204 (FIOP) was calculated as the % conversion formed by the variant over % conversion of SEQ ID NO: 204 and shown in Table 11.1.

TABLE 11.1
Relative to SEQ ID NO: 204

| SEQ | Amino Acid | Amino Acid | FIOP |
|---|---|---|---|
| ID | Differences | Differences | Relative to |
| NO: | (Relative to | (Relative to | SEQ ID |
| (nt/aa) | SEQ ID NO: 14) | SEQ ID NO: 204) | NO: 204 |
| 479/480 | H2E/K15Y/H39S/T69D/M95V/Y144W/ | H2E/H39S/T69D/Y144W/ | +++ |
| | V149R/A154C/G156L/V177P/Y186R/ | T156L/M316L/T330M | |
| | D195G/N224Y/K226I/M316L/T330M | | |
| 483/484 | K15Y/T69D/M95V/V149R/A154C/G156T/ | T69D/T212I/K256A/T330M | +++ |
| | V177P/Y186R/D195G/T212I/N224Y/ | | |
| | K226I/K256A/T330M | | |
| 481/482 | H2V/K15Y/H39S/T69D/M95V/Q119T/ | H2V/H39S/T69D/Q119T/ | +++ |
| | V149R/A154C/G156T/V177P/N185K/ | N185K/M316L | |
| | Y186R/D195G/N224Y/K226I/M316L | | |
| 485/486 | K15Y/H39S/M95V/Q119T/V149R/ | H39S/Q119T/K256A/ | +++ |
| | A154C/G156T/V177P/Y186R/D195G/N224Y/ | M316L/K326R/T330M | |
| | K226I/K256A/M316L/K326R/T330M | | |
| 489/490 | H2E/K15Y/H39S/M95V/Q119T/Y144W/ | H2E/H39S/Q119T/Y144W/ | +++ |
| | V149R/A154C/G156N/L159F/V177P/ | T156N/L159F/H202Y/K256 | |
| | Y186R/D195G/H202Y/N224Y/K226I/K256A/ | A/M316L/K326R/T330M | |
| | M316L/K326R/T330M | | |
| 513/514 | K15Y/M95V/V149R/A154C/G156Q/ | T156Q/V266L/M316L/ | +++ |
| | 7V17P/Y186R/D195G/N224Y/K226I/V266L/ | T330R/Q334R/N335H | |
| | M316L/T330R/Q334R/N335H | | |
| 487/488 | K15Y/T69D/M95V/G116N/Q119T/V149 | T69D/G116N/Q119T/ | +++ |
| | R/A154C/G156T/V177P/N185K/Y186R/ | N185K/T330M | |
| | D195G/N224Y/K226I/T330M | | |
| 501/502 | K15Y/H39S/T69D/M95V/G116N/Y144W/ | H39S/T69D/G116N/Y144W/ | +++ |
| | V149R/A154C/G156T/V177P/K181D/ | K181D/N185K/K256A/ | |
| | N185K/Y186R/D195G/N224Y/K226I/ | T330M | |
| | K256A/T330M | | |
| 527/528 | K15Y/H39Q/M95V/V149R/A154C/G156A/ | H39Q/T156A/Q334R/ | +++ |
| | V177P/Y186R/D195G/N224Y/K226I/ | L345V | |
| | Q334R/L345V | | |
| 529/530 | K15Y/M95V/V149R/A154C/G156T/V177P/ | N230D/V266L/Q334R | ++ |
| | Y186R/D195G/N224Y/K226I/N230D/ | | |
| | V266L/Q334R | | |
| 515/516 | K15Y/H39Q/I63V/M95V/V149R/A154C/ | H39Q/I63V/T156Q/I183V/ | ++ |
| | G156Q/V177P/I183V/N185G/Y186R/D195G/ | N185G/N230D/T330R/Q334R | |
| | N224Y/K226I/N230D/T330R/Q334R | | |
| 547/548 | K15Y/K89W/M95V/V149R/A154C/G156A/ | K89W/T156A/N185G/N230D/ | ++ |
| | V177P/N185G/Y186R/D195G/N224Y/ | M316L/L345V | |
| | K226I/N230D/M316L/L345V | | |
| 559/560 | K15Y/H39Q/M95V/V149R/A154C/G156Q/ | H39Q/T156Q/N230D/ | ++ |
| | V177P/Y186R/D195G/N224Y/K226I/ | V266L/Q334R/N335H | |
| | N230D/V266L/Q334R/N335H | | |
| 511/512 | K15Y/H39Q/I63V/M95V/V149R/A154C/ | H39Q/I63V/T156Q/N230D/ | ++ |
| | G156Q/V177P/Y186R/D195G/N224Y/ | V257L/T275N/T330R/ | |
| | K226I/N230D/V257L/T275N/T330R/N335H | N335H | |
| 555/556 | K15Y/K89H/M95V/V149R/A154C/G156T/ | K89H/N230D/V266L/ | ++ |
| | V177P/Y186R/D195G/N224Y/K226I/ | L345V | |
| | N230D/V266L/L345V | | |
| 569/570 | K15Y/H81Y/M95V/V149R/A154C/G156Q/ | H81Y/T156Q/T330R/ | ++ |
| | V177P/Y186R/D195G/N224Y/K226I/ | N335H/L345V | |
| | T330R/N335H/L345V | | |
| 543/544 | K15Y/M95V/V149R/A154C/G156Q/ | T156Q/V257L/T275N/ | ++ |
| | V177P/Y186R/D195G/N224Y/K226I/V257L/ | Q334R | |
| | T275N/Q334R | | |
| 571/572 | K15Y/M95V/V149R/A154C/G156A/ | T156A/I183V/N230D/ | ++ |
| | V177P/I183V/Y186R/D195G/N224Y/K226I/ | V266L | |
| | N230D/V266L | | |
| 507/508 | K15Y/H39S/T69D/M95V/Y144W/V149R/ | H39S/T69D/Y144W/T156L/ | ++ |
| | A154C/G156L/V177P/N185K/Y186R/ | N185K/M316L/T330M | |
| | D195G/N224Y/K226I/M316L/T330M | | |
| 517/518 | K15Y/T69D/M95V/Y144W/V149R/ | T69D/Y144W/M316L | ++ |
| | A154C/G156T/V177P/Y186R/D195G/N224Y/ | | |
| | K226I/M316L | | |
| 493/494 | H2V/K15Y/H39S/T69D/M95V/G116N/ | H2V/H39S/T69D/G116N/ | ++ |
| | Y144W/V149R/A154C/G156L/V177P/ | Y144W/T156L/N185K | |
| | N185K/Y186R/D195G/N224Y/K226I | | |
| 533/534 | K15Y/M95V/V149R/A154C/G156A/ | T156A/I183V/N185G/ | ++ |
| | V177P/I183V/N185G/Y186R/D195G/N224Y/ | N230D | |
| | K226I/N230D | | |
| 541/542 | K15Y/H39Q/M95V/V149R/A154C/G156Q/ | H39Q/T156Q/V257L/ | ++ |
| | V177P/Y186R/D195G/N224Y/K226I/ | V266L/M316L/Q334R | |
| | V257L/V266L/M316L/Q334R | | |
| 567/568 | K15Y/M95V/V149R/A154C/G156T/ | N230D | + |
| | V177P/Y186R/D195G/N224Y/K226I/N230D | | |
| 565/566 | K15Y/M95V/V149R/A154C/G156T/V177P/ | N230D/V257L/T275N/ | + |
| | Y186R/D195G/N224Y/K226I/N230D/ | M316L/T330R/L345V | |
| | V257L/T275N/M316L/T330R/L345V | | |
| 539/540 | K15Y/T69D/M95V/S138R/Y144W/V149R/ | T69D/S138R/Y144W/L159F/ | + |
| | A154C/G156T/L159F/V177P/N185K/ | N185K/H202Y/M316L | |
| | Y186R/D195G/H202Y/N224Y/K226I/ | | |
| | M316L | | |
| 497/498 | H2E/K15Y/M95V/G116N/Q119T/V149R/ | H2E/G116N/Q119T/M316L | + |
| | A154C/G156T/V177P/Y186R/D195G/ | | |
| | N224Y/K226I/M316L | | |
| 553/554 | K15Y/H39Q/H81Y/M95V/V149R/A154C/ | H39Q/H81Y/N185G/M316L/ | + |
| | G156T/V177P/N185G/Y186R/D195G/ | Q334R | |
| | N224Y/K226I/M316L/Q334R | | |
| 503/504 | H2E/K15Y/H39S/T69D/M95V/Q119T/ | H2E/H39S/T69D/Q119T/ | + |
| | 4Y14W/V149R/A154C/G156L/V177P/ | Y144W/T156L/N185K/ | |
| | N185K/Y186R/D195G/N224Y/K226I/H314W | H314W | |
| 563/564 | K15Y/M95V/Q119T/V149R/A154C/ | Q119T/T156N/H202Y | + |
| | G156N/V177P/Y186R/D195G/H202Y/N224Y/ | | |
| | K226I | | |
| 561/562 | K15Y/M95V/V149R/A154C/G156Q/ | T156Q/N185G/T275N/ | + |
| | V177P/N185G/Y186R/D195G/N224Y/ | M316L/T330R | |
| | K226I/T275N/M316L/T330R | | |
| 557/558 | K15Y/H39Q/M95V/V149R/A154C/G156Q/ | H39Q/T156Q/N230D/ | + |
| | V177P/Y186R/D195G/N224Y/K226I/ | T275N/M316L | |
| | N230D/T275N/M316L | | |
| 523/524 | K15Y/H39Q/H81Y/M95V/V149R/A154C/ | H39Q/H81Y/T156Q/N230D | + |
| | G156Q/V177P/Y186R/D195G/N224Y/ | | |
| | K226I/N230D | | |
| 491/492 | K15Y/H81Y/M95V/V149R/A154C/G156T/ | H81Y/I183V/N185G/N230D | + |
| | V177P/I183V/N185G/Y186R/D195G/ | | |
| | N224Y/K226I/N230D | | |
| 531/532 | H2V/K15Y/M95V/G116N/Y144W/V149R/ | H2V/G116N/Y144W/ | + |
| | A154C/G156L/L159F/V177P/Y186R/ | T156L/L159F | |
| | D195G/N224Y/K226I | | |
| 505/506 | A14K/K15Y/H39S/T69D/M95V/Y144W/ | A14K/H39S/T69D/Y144W/ | + |
| | V149R/A154C/G156N/V177P/Y186R/ | T156N/T212I/K256A/H314W/ | |
| | D195G/T212I/N224Y/K226I/K256A/ | M316L/K326R/T330M | |
| | H314W/M316L/K326R/T330M | | |
| 495/496 | H2E/A14K/K15Y/H39S/T69D/M95V/ | H2E/A14K/H39S/T69D/G116N/ | + |
| | G116N/Q119T/V149R/A154C/G156T/ | Q119T/L159F/N185K/K | |
| | L159F/V177P/N185K/Y186R/D195G/ | 256A/K326R | |
| | N224Y/K226I/K256A/K326R | | |
| 521/522 | K15Y/H39S/T69D/M95V/Q119T/S138R/ | H39S/T69D/Q119T/S138R/ | + |
| | V149R/A154C/G156T/V177P/K181D/ | K181D/N185K/M316L/ | |
| | N185K/Y186R/D195G/N224Y/K226I/ | K326R | |
| | M316L/K326R | | |
| 509/510 | K15Y/M95V/V149R/A154C/G156Q/ | T156Q/N185G/Q334R/ | + |
| | V177P/N185G/Y186R/D195G/N224Y/K226I/ | N335H | |
| | Q334R/N335H | | |
| 525/526 | H2V/A14K/K15Y/T69D/M95V/G116N/ | H2V/A14K/T69D/G116N/ | + |
| | Q119T/Y144W/V149R/A154C/G156T/ | Q119T/Y144W/L159F/K326R/ | |
| | L159F/V177P/Y186R/D195G/N224Y/ | T330M | |
| | K226I/K326R/T330M | | |
| 537/538 | K15Y/H39Q/I63V/M95V/V149R/A154C/ | H39Q/I63V/T156A/N230D/ | + |
| | G156A/V177P/Y186R/D195G/N224Y/ | M316L/L345V | |
| | K226I/N230D/M316L/L345V | | |
| 519/520 | K15Y/M95V/G116N/Q119T/V149R/ | G116N/Q119T/T156L/ | + |
| | A154C/G156L/V177P/Y186R/D195G/H202Y/ | H202Y/T212I/K326R/T330M | |
| | T212I/N224Y/K226I/K326R/T330M | | |
| 499/500 | K15Y/M95V/G116N/Q119T/Y144W/ | G116N/Q119T/Y144W/ | + |
| | V149R/A154C/G156T/V177P/N185K/Y186R/ | N185K/H314W/M316L | |
| | D195G/N224Y/K226I/H314W/M316L | | |
| 545/546 | K15Y/M95V/V149R/A154C/G156T/ | I183V | + |
| | V177P/I183V/Y186R/D195G/N224Y/K226I | | |
| 551/552 | K15Y/M95V/Y144W/V149R/A154C/ | Y144W/T156L/M316L/ | + |
| | G156L/V177P/Y186R/D195G/N224Y/ | T330M | |
| | K226I/M316L/T330M | | |
| 535/536 | H2E/A14K/K15Y/M95V/G116N/V149R/ | H2E/A14K/G116N/M316L/ | + |
| | A154C/G156T/V177P/Y186R/D195G/ | K326R/T330M | |
| | N224Y/K226I/M316L/K326R/T330M | | |
| 549/550 | H2E/A14K/K15Y/M95V/Q119T/V149R/ | H2E/A14K/Q119T | + |
| | A154C/G156T/V177P/Y186R/D195G/ | | |
| | N224Y/K226I | | |

Levels of increased activity were determined relative to the reference polypeptide of SEQ ID NO: 204 and defined as follows: “+” 1.45 to 2.33 (first 50%), “++” > 2.33 (next 30%), “+++” > 2.50 (top 20%)

### Example 12

### Improvements Over SEQ ID NO: 204 in RNA Ligase 2 Activity

[0418] The same samples from Example I11 were tested again, but with a higher fragment load. To screen, 20%(v/v) lysate was transferred into reactions containing 50 mM Tris-HCl buffer at pH 7.5, 2 mM MgCl₂, 1 mM DTT, 0.4 mM ATP, and 4 mM of an equimolar mixture of the fragments compromising Reaction 2 (sense strands 1-3, and antisense strands 1-2). The reactions were mixed before being incubated for 16 hr at 37° C. in a PCR thermocycler. Afterwards, EDTA was added to each reaction to a final concentration of 20 mM and the samples analyzed via UPLC to quantify the remaining fragment concentrations and product yields.

[0419] Using peak area from Analytical method 13.1, the % conversion for each sample was calculated as shown here:

$$\% conversion = \frac{area under the curve for all products}{\begin{matrix}Total area under the curve for all \\ products and remaining fragments\end{matrix}} * 100$$

[0420] Activity relative to SEQ ID NO: 204 (FIOP) was calculated as the % conversion formed by the variant over % conversion of SEQ ID NO: 204 and shown in Table 12.1.

TABLE 12.1
Relative to SEQ ID NO: 204

| SEQ | Amino Acid | Amino Acid | FIOP |
|---|---|---|---|
| ID | Differences | Differences | Relative to |
| NO: | (Relative to | (Relative to | SEQ ID |
| (nt/aa) | SEQ ID NO: 14) | SEQ ID NO: 204) | NO: 204 |
| 479/480 | H2E/K15Y/H39S/T69D/M95V/Y144W/ | H2E/H39S/T69D/Y144W/ | +++ |
| | V149R/A154C/G156L/V177P/Y186R/ | T156L/M316L/T330M | |
| | D195G/N224Y/K226I/M316L/T330M | | |
| 501/502 | K15Y/T69D/M95V/V149R/A154C/ | H39S/T69D/G116N/Y144W/ | +++ |
| | G156T/V177P/Y186R/D195G/T212I/ | K181D/N185K/K256A/T330M | |
| | N224Y/K226I/K256A/T330M | | |
| 481/482 | H2V/K15Y/H39S/T69D/M95V/Q119T/ | H2V/H39S/T69D/Q119T/ | +++ |
| | V149R/A154C/G156T/V177P/N185K/ | N185K/M316L | |
| | Y186R/D195G/N224Y/K226I/M316L | | |
| 483/484 | K15Y/H39S/M95V/Q119T/V149R/ | T69D/T212I/K256A/T330M | +++ |
| | A154C/G156T/V177P/Y186R/D195G/N224Y/ | | |
| | K226I/K256A/M316L/K326R/T330M | | |
| 513/514 | H2E/K15Y/H39S/M95V/Q119T/Y144W/ | T156Q/V266L/M316L/T330R/ | +++ |
| | V149R/A154C/G156N/L159F/V177P/ | Q334R/N335H | |
| | Y186R/D195G/H202Y/N224Y/K226I/ | | |
| | K256A/M316L/K326R/T330M | | |
| 489/490 | K15Y/M95V/V149R/A154C/G156Q/ | H2E/H39S/Q119T/Y144W/T15 | +++ |
| | V177P/Y186R/D195G/N224Y/K226I/V266L/ | 6N/L159F/H202Y/K256A/M31 | |
| | M316L/T330R/Q334R/N335H | 6L/K326R/T330M | |
| 529/530 | K15Y/T69D/M95V/G116N/Q119T/V149R/ | N230D/V266L/Q334R | +++ |
| | A154C/G156T/V177P/N185K/Y186R/ | | |
| | D195G/N224Y/K226I/T330M | | |
| 527/528 | K15Y/H39S/T69D/M95V/G116N/Y144W/ | H39Q/T156A/Q334R/L345V | +++ |
| | V149R/A154C/G156T/V177P/K181D/ | | |
| | N185K/Y186R/D195G/N224Y/K226I/ | | |
| | K256A/T330M | | |
| 515/516 | K15Y/H39Q/M95V/V149R/A154C/G156A/ | H39Q/I63V/T156Q/I183V/ | +++ |
| | V177P/Y186R/D195G/N224Y/K226I/ | N185G/N230D/T330R/Q334R | |
| | Q334R/L345V | | |
| 541/542 | K15Y/M95V/V149R/A154C/G156T/ | H39Q/T156Q/V257L/V266L/ | ++ |
| | V177P/Y186R/D195G/N224Y/K226I/ | M316L/Q334R | |
| | N230D/V266L/Q334R | | |
| 565/566 | K15Y/H39Q/I63V/M95V/V149R/ | N230D/V257L/T275N/M316L/ | ++ |
| | A154C/G156Q/V177P/I183V/N185G/Y186R/ | T330R/L345V | |
| | D195G/N224Y/K226I/N230D/T330R/ | | |
| | Q334R | | |
| 493/494 | K15Y/K89W/M95V/V149R/A154C/ | H2V/H39S/T69D/G116N/ | ++ |
| | G156A/V177P/N185G/Y186R/D195G/N224 | Y144W/T156L/N185K | |
| | Y/K226I/N230D/M316L/L345V | | |
| 571/572 | K15Y/H39Q/M95V/V149R/A154C/ | T156A/I183V/N230D/V266L | ++ |
| | G156Q/V177P/Y186R/D195G/N224Y/ | | |
| | K226I/N230D/V266L/Q334R/N335H | | |
| 547/548 | K15Y/H39Q/I63V/M95V/V149R/A154C/ | K89W/T156A/N185G/N230D/ | ++ |
| | G156Q/V177P/Y186R/D195G/N224Y/ | M316L/L345V | |
| | K226I/N230D/V257L/T275N/T330R/ | | |
| | N335H | | |
| 559/560 | K15Y/K89H/M95V/V149R/A154C/ | H39Q/T156Q/N230D/V266L/ | ++ |
| | G156T/V177P/Y186R/D195G/N224Y/K226I/ | Q334R/N335H | |
| | N230D/V266L/L345V | | |
| 511/512 | K15Y/H81Y/M95V/V149R/A154C/G156Q/ | H39Q/I63V/T156Q/N230D/ | ++ |
| | V177P/Y186R/D195G/N224Y/K226I/ | V257L/T275N/T330R/N335H | |
| | T330R/N335H/L345V | | |
| 555/556 | K15Y/M95V/V149R/A154C/G156Q/ | K89H/N230D/V266L/L345V | ++ |
| | V177P/Y186R/D195G/N224Y/K226I/V257L/ | | |
| | T275N/Q334R | | |
| 533/534 | K15Y/M95V/V149R/A154C/G156A/ | T156A/I183V/N185G/N230D | ++ |
| | V177P/I183V/Y186R/D195G/N224Y/K226I/ | | |
| | N230D/V266L | | |
| 485/486 | K15Y/H39S/T69D/M95V/Y144W/V149R/ | H39S/Q119T/K256A/M316L/ | ++ |
| | A154C/G156L/V177P/N185K/Y186R/ | K326R/T330M | |
| | D195G/N224Y/K226I/M316L/T330M | | |
| 487/488 | K15Y/T69D/M95V/Y144W/V149R/ | T69D/G116N/Q119T/N185K/ | ++ |
| | A154C/G156T/V177P/Y186R/D195G/N224Y/ | T330M | |
| | K226I/M316L | | |
| 567/568 | H2V/K15Y/H39S/T69D/M95V/G116N/ | N230D | ++ |
| | Y144W/V149R/A154C/G156L/V177P/ | | |
| | N185K/Y186R/D195G/N224Y/K226I | | |
| 507/508 | K15Y/M95V/V149R/A154C/G156A/ | H39S/T69D/Y144W/T156L/ | ++ |
| | V177P/I183V/N185G/Y186R/D195G/ | N185K/M316L/T330M | |
| | N224Y/K226I/N230D | | |
| 543/544 | K15Y/H39Q/M95V/V149R/A154C/ | T156Q/V257L/T275N/Q334R | ++ |
| | G156Q/V177P/Y186R/D195G/N224Y/K226I/ | | |
| | V257L/V266L/M316L/Q334R | | |
| 569/570 | K15Y/M95V/V149R/A154C/G156T/ | H81Y/T156Q/T330R/N335H/ | + |
| | V177P/Y186R/D195G/N224Y/K226I/N230D | L345V | |
| 503/504 | K15Y/M95V/V149R/A154C/G156T/ | H2E/H39S/T69D/Q119T/ | + |
| | V177P/Y186R/D195G/N224Y/K226I/N230D/ | Y144W/T156L/N185K/H314W | |
| | V257L/T275N/M316L/T330R/L345V | | |
| 491/492 | K15Y/T69D/M95V/S138R/Y144W/ | H81Y/I183V/N185G/N230D | + |
| | V149R/A154C/G156T/L159F/V177P/N185K/ | | |
| | Y186R/D195G/H202Y/N224Y/K226I/ | | |
| | M316L | | |
| 523/524 | H2E/K15Y/M95V/G116N/Q119T/V149R/ | H39Q/H81Y/T156Q/N230D | + |
| | A154C/G156T/V177P/Y186R/D195G/ | | |
| | N224Y/K226I/M316L | | |
| 557/558 | K15Y/H39Q/H81Y/M95V/V149R/ | H39Q/T156Q/N230D/T275N/ | + |
| | A154C/G156T/V177P/N185G/Y186R/D195G/ | M316L | |
| | N224Y/K226I/M316L/Q334R | | |
| 553/554 | H2E/K15Y/H39S/T69D/M95V/Q119T/ | H39Q/H81Y/N185G/M316L/ | + |
| | Y144W/V149R/A154C/G156L/V177P/ | Q334R | |
| | N185K/Y186R/D195G/N224Y/K226I/ | | |
| | H314W | | |
| 517/518 | K15Y/M95V/Q119T/V149R/A154C/ | T69D/Y144W/M316L | + |
| | G156N/V177P/Y186R/D195G/H202Y/ | | |
| | N224Y/K226I | | |
| 497/498 | K15Y/M95V/V149R/A154C/G156Q/ | H2E/G116N/Q119T/M316L | + |
| | V177P/N185G/Y186R/D195G/N224Y/ | | |
| | K226I/T275N/M316L/T330R | | |
| 539/540 | K15Y/H39Q/M95V/V149R/A154C/ | T69D/S138R/Y144W/L159F/ | + |
| | G156Q/V177P/Y186R/D195G/N224Y/K226I/ | N185K/H202Y/M316L | |
| | N230D/T275N/M316L | | |
| 521/522 | K15Y/H39Q/H81Y/M95V/V149R/ | H39S/T69D/Q119T/S138R/ | + |
| | A154C/G156Q/V177P/Y186R/D195G/ | K181D/N185K/M316L/K326R | |
| | N224Y/K226I/N230D | | |
| 495/496 | K15Y/H81Y/M95V/V149R/A154C/ | H2E/A14K/H39S/T69D/ | + |
| | G156T/V177P/I183V/N185G/Y186R/D195G/ | G116N/Q119T/L159F/N185K/ | |
| | N224Y/K226I/N230D | K256A/K326R | |
| 505/506 | H2V/K15Y/M95V/G116N/Y144W/ | A14K/H39S/T69D/Y144W/ | + |
| | V149R/A154C/G156L/L159F/V177P/Y186R/ | T156N/T212I/K256A/H314W/ | |
| | D195G/N224Y/K226I | M316L/K326R/T330M | |
| 563/564 | A14K/K15Y/H39S/T69D/M95V/Y144W/ | Q119T/T156N/H202Y | + |
| | V149R/A154C/G156N/V177P/Y186R/ | | |
| | D195G/T212I/N224Y/K226I/K256A/ | | |
| | H314W/M316L/K326R/T330M | | |
| 531/532 | H2E/A14K/K15Y/H39S/T69D/M95V/ | H2V/G116N/Y144W/T156L/ | + |
| | G116N/Q119T/V149R/A154C/G156T/ | L159F | |
| | L159F/V177P/N185K/Y186R/D195G/N224Y/ | | |
| | K226I/K256A/K326R | | |
| 537/538 | K15Y/H39S/T69D/M95V/Q119T/S138R/ | H39Q/I63V/T156A/N230D/ | + |
| | V149R/A154C/G156T/V177P/K181D/ | M316L/L345V | |
| | N185K/Y186R/D195G/N224Y/K226I/ | | |
| | M316L/K326R | | |
| 509/510 | K15Y/M95V/V149R/A154C/G156Q/ | T156Q/N185G/Q334R/N335H | + |
| | V177P/N185G/Y186R/D195G/N224Y/ | | |
| | K226I/Q334R/N335H | | |
| 499/500 | H2V/A14K/K15Y/T69D/M95V/G116N/ | G116N/Q119T/Y144W/N185K/ | + |
| | Q119T/Y144W/V149R/A154C/G156T/ | H314W/M316L | |
| | L159F/V177P/Y186R/D195G/N224Y/ | | |
| | K226I/K326R/T330M | | |
| 525/526 | K15Y/H39Q/I63V/M95V/V149R/A154C/ | H2V/A14K/T69D/G116N/ | + |
| | G156A/V177P/Y186R/D195G/N224Y/ | Q119T/Y144W/L159F/K326R/ | |
| | K226I/N230D/M316L/L345V | T330M | |
| 519/520 | K15Y/M95V/G116N/Q119T/V149R/ | G116N/Q119T/T156L/H202Y/ | + |
| | A154C/G156L/V177P/Y186R/D195G/ | T212I/K326R/T330M | |
| | H202Y/T212I/N224Y/K226I/K326R/T330M | | |
| 561/562 | K15Y/M95V/G116N/Q119T/Y144W/ | T156Q/N185G/T275N/M316L/ | + |
| | V149R/A154C/G156T/V177P/N185K/Y186R/ | T330R | |
| | D195G/N224Y/K226I/H314W/M316L | | |
| 545/546 | K15Y/M95V/V149R/A154C/G156T/ | I183V | + |
| | V177P/I183V/Y186R/D195G/N224Y/K226I | | |
| 551/552 | K15Y/M95V/Y144W/V149R/A154C/ | Y144W/T156L/M316L/T330M | + |
| | G156L/V177P/Y186R/D195G/N224Y/ | | |
| | K226I/M316L/T330M | | |
| 535/536 | H2E/A14K/K15Y/M95V/G116N/V149R/ | H2E/A14K/G116N/M316L/ | + |
| | A154C/G156T/V177P/Y186R/D195G/ | K326R/T330M | |
| | N224Y/K226I/M316L/K326R/T330M | | |
| 549/550 | H2E/A14K/K15Y/M95V/Q119T/V149R/ | H2E/A14K/Q119T | + |
| | A154C/G156T/V177P/Y186R/D195G/ | | |
| | N224Y/K226I | | |

Levels of increased activity were determined relative to the reference polypeptide of SEQ ID NO: 204 and defined as follows: “+” 1.36 to 3.03 (first 50%), “++” > 3.03 (next 30%), “+++” > 3.52 (top 20%)

### Example 13

### Analytical Detection of RNA Oligomers by UPLC-UV

[0421] Data described in Examples 4-12 was collected using the analytical method provided in Table 13.1. The method provided herein finds use in analyzing the variants produced using the present disclosure.

TABLE 13.1
Analytical Method

| Instrument | Agilent 1290-UPLC | | |
|---|---|---|---|
| Column | 50 × 2.1 mm Waters BEH C18, 1.7 μm particle size (180 Å) | | |
| Mobile Phase | A: 10 mM DIPEA, 100 mM HFIP in water, B: Acetonitrile | | |
| Gradient | Time (min) | % A | % B |
| | 0 | 95 | 5 |
| | 1 | 91.5 | 8.5 |
| | 2 | 91 | 9 |
| | 3 | 86 | 14 |
| | 3.1 | 10 | 90 |
| | 3.8 | 10 | 90 |
| | 3.9 | 95 | 5 |
| | 5.2 | 95 | 5 |

| Flow Rate | 0.4 | mL/min |
|---|---|---|
| Run Time | 5.5 | min |
| Product Elution order | peak name | minutes |
| | sense strand fragment 5 | 0.6 |
| | antisense strand fragment 4 | 1.1 |
| | antisense strand fragment 3 | 1.3 |
| | sense strand fragment 2 | 1.8 |
| | sense strand fragment 3 | 1.9 |
| | antisense strand fragment 2 | 2.1 |
| | antisense strand fragment 1 | 2.4 |
| | sense strand fragment 1 | 2.6 |
| | sense strand fragment 4 | 3 |
| | Product 2 | 3.2 |
| | Product 1 | 3.4 |
| Column Temperature | 75° | C. |
| Injection Volume | 2 | μL |

| | |
|---|---|
| Detection | UV 258 nm (20 Hz) |

[0422] While the invention has been described with reference to the specific embodiments, various changes can be made and equivalents can be substituted to adapt to a particular situation, material, composition of matter, process, process step or steps, thereby achieving benefits of the invention without departing from the scope of what is claimed.

[0423] For all purposes, each and every publication and patent document cited in this disclosure is incorporated herein by reference as if each such publication or document was specifically and individually indicated to be incorporated herein by reference. Citation of publications and patent documents is not intended as an indication that any such document is pertinent prior art, nor does it constitute an admission as to its contents or date.

The application's sequence listing, which the Patent Office published only in electronic form, follows.

SEQUENCE LISTING (590 sequences)

SEQ ID NO: 1 - DNA, 1035 bp, synthetic construct
  misc_feature 1..1035: note = Engineered RNA ligase variants
  source 1..1035: mol_type = other DNA
atgcatcaccatcaccatcacggtggcagcggtatgtttaagaaatatagtagcctggaaaaccattacaattcgaaattcattgagaaactttattcattgggcttaaccggtggtgaatgggtggcgcgcgaaaagatccacggcacgaacttttccctgattatcgagcgtgataaagttacttgcgccaaacgtacaggcccgattctgccagcagaagacttcttcgggtacgaaatcatcctgaagaattatgctgatagcattaaagcggtccaggacattatggaaacctctgctgtggtgtcgtaccaagtatttggagaatttgcaggtccgggcatccagaagaacgtcgattactgtgataaagacttctatgtttttgatattattgtaaccaccgagagcggtgatgtgacgtatgttgacgactatatgatggaatccttctgcaatacgtttaaattcaagatggcccctttattaggacgcggcaaatttgaggagctgatcaaattgccgaacgatctggatagtgtcgtgcaggattacaactttactgttgatcatgcggggctggtggacgccaacaaatgtgtatggaatgcggaagcaaaaggtgaagtctttaccgcggaaggctatgtgctcaaaccctgctatccgtcttggcttcgcaatggcaatcgtgtcgccatcaaatgtaagaacagcaaattctcggagaagaagaaatcagacaaaccaattaaagctaaagttgaactgagtgaagcggataacaaactggtgggtattttggcatgctacgttacactgaatcgcgtgaacaacgtaatcagcaagattggcgaaattggtccgaaagatttcgggaaagttatgggtcttaccgtgcaagatatcctcgaagaaacgtctcgtgagggcatcaccttaactcaggccgacaatccttccctcattaagaaagaattggtcaagatggtgcaggatgttcttcgtccggcgtggattgagctcgtatcg

SEQ ID NO: 2 - protein, 345 aa, synthetic construct
  REGION 1..345: note = Engineered RNA ligase variants
MHHHHHHGGSGMFKKYSSLENHYNSKFIEKLYSLGLTGGEWVAREKIHGTNFSLIIERDKVTCAKRTGPILPAEDFFGYEIILKNYADSIKAVQDIMETSAVVSYQVFGEFAGPGIQKNVDYCDKDFYVFDIIVTTESGDVTYVDDYMMESFCNTFKFKMAPLLGRGKFEELIKLPNDLDSVVQDYNFTVDHAGLVDANKCVWNAEAKGEVFTAEGYVLKPCYPSWLRNGNRVAIKCKNSKFSEKKKSDKPIKAKVELSEADNKLVGILACYVTLNRVNNVISKIGEIGPKDFGKVMGLTVQDILEETSREGITLTQADNPSLIKKELVKMVQDVLRPAWIELVS

SEQ ID NO: 3 - DNA, 1029 bp, synthetic construct
  misc_feature 1..1029: note = Engineered RNA ligase variants
  source 1..1029: mol_type = other DNA
atgcatcaccatcaccatcacggtggcagcggtatgtttaagaaatattctagtctggaaaaccattacaatagcaaattcattgagaaactctataccaacggcttaactactggtgtgtgggttgcgcgcgaaaagatccacgggacgaacttttcgctgattatcgagcgtgataatgtaacatgcgccaaacgtacaggcccgattttgcctgcagaagacttctacggttatgaaatcgtcctgaagaaatacgataaagcgattaagacggtgcagaaatttatgtataccgcccgcgcggtttcctaccaagtgttcggagaatttgctggcggcggtatccagaaaggtgtcgattatggcgagaaagacttctatgtgtttgatattctgatcaatacggaatcaggagacaacacgtacctgactgattatgaaatgcaggacttctgtaatgaatttgggtttaagatggcaccaatgcttggtcgcggcacattcgatagcctgattatgattccgaacgatttggattcggttctcgccgcttacaatgcaacggcgagcgaggacctggtagaagcgaacaactgcgtctttgatgccaatgtgatcggtgataacactgctgaaggctatgttcttaaaccgtgtttccccaaatggttaccgaatgggacgcgtgtggcgatcaaatgcaagaactccaaattcagcgagaagaagaaaagtgacaaaccgatcaagacacaagtcccactgacggaaattgataagaatctgctggacgtattggcctgttacgtcactttaaaccgcgtgaacaacgtgatctctaagattggaacagtgacgccgaaagattttggcaaagtaatgggtctgactgttcaggatattctggaagaaacgtcacgtgagggtattgttctgacgacatcggacaatcctaatctcgtcaagaaagaacttgttcgcatggtgcaggatgtattacgtcccgcatggatcgaactggtgtcg

SEQ ID NO: 4 - protein, 343 aa, synthetic construct
  REGION 1..343: note = Engineered RNA ligase variants
MHHHHHHGGSGMFKKYSSLENHYNSKFIEKLYTNGLTTGVWVAREKIHGTNFSLIIERDNVTCAKRTGPILPAEDFYGYEIVLKKYDKAIKTVQKFMYTARAVSYQVFGEFAGGGIQKGVDYGEKDFYVFDILINTESGDNTYLTDYEMQDFCNEFGFKMAPMLGRGTFDSLIMIPNDLDSVLAAYNATASEDLVEANNCVFDANVIGDNTAEGYVLKPCFPKWLPNGTRVAIKCKNSKFSEKKKSDKPIKTQVPLTEIDKNLLDVLACYVTLNRVNNVISKIGTVTPKDFGKVMGLTVQDILEETSREGIVLTTSDNPNLVKKELVRMVQDVLRPAWIELVS

SEQ ID NO: 5 - DNA, 750 bp, synthetic construct
  misc_feature 1..750: note = Engineered RNA ligase variants
  source 1..750: mol_type = other DNA
atgcatcaccatcaccatcacggtggcagcggtatgtttaagaaatatagtagtctggaaaaccattacaatagcaaattcattgagaaattgtataccaacggcctgacgactggtgtgtgggttgcgcgcgaaaagatccacgggaccaacttttcgctcattatcgagcgtgataatgtaacatgcgccaaacgtactggtccgattctgccagcagaagacttctacggctatgaaatcgtcctgaagaaatacgataaagctattaaagcggtgcaggagtttatgtataccgctcgcgccgtcagctaccaagttttcggagaatttgcaggcggcggtatccagaaaggtgtggattatggcgaaaaagacttctatgtgtttgatatccttattaatacggaatccggagacaacacctacttaacggattatgaaatgcaggacttctgtaacgagtttgggtttaagatggcgccgatgctgggtcgcggcaccttcgatgccttgattaccatccctaatgatctggattctgttttagcggcgtacaacgcaacggcctcagaagacctggtagaagcgaataactgcgtctttgatgctaacgtgattggtgacaatacagcagagggctatgttctcaaaccgtgttttcccaaatggctgccgaatggtactcgtgtggccattaaatgcaagaacagcaaattctcggaaaagaagaaatccgataaagcgtac

SEQ ID NO: 6 - protein, 250 aa, synthetic construct
  REGION 1..250: note = Engineered RNA ligase variants
MHHHHHHGGSGMFKKYSSLENHYNSKFIEKLYTNGLTTGVWVAREKIHGTNFSLIIERDNVTCAKRTGPILPAEDFYGYEIVLKKYDKAIKAVQEFMYTARAVSYQVFGEFAGGGIQKGVDYGEKDFYVFDILINTESGDNTYLTDYEMQDFCNEFGFKMAPMLGRGTFDALITIPNDLDSVLAAYNATASEDLVEANNCVFDANVIGDNTAEGYVLKPCFPKWLPNGTRVAIKCKNSKFSEKKKSDKAY

SEQ ID NO: 7 - DNA, 1038 bp, synthetic construct
  misc_feature 1..1038: note = Engineered RNA ligase variants
  source 1..1038: mol_type = other DNA
atgcatcaccatcaccatcacggtggcagcggtatgtttaagaaatatagtagtctggaaaaccattacaatagcaaattcattgagaaactccgtaccaacggcttgacgggtggtgaatgggttgcgcgcgagaagatccacggcaccaacttttcgctgatcattgaacgtgatgccgtcacatgcgcaaaacgcacggggccgattttaccagctgaagacttctatggctacgaaatcgtactgaagaattatgcggattccatcaaatctgttcagcatctgattgagagcattaactaccaatcgtatcagatctacggtgaatttgcaggcaccggaatccagaagaatgtggattatggtgacaaagatttctatgtgtttgacattcgcgtgactaaagaagatggaagcgaatccgtccttaccgatactctgatggaggccttctgtatcatccacaaatttaaagtagcaccgtgcttagctaccgggtcatttgaagacctgattaaattgcctaatgatttcgattctgttgttccggactacaactttgccgtcgataatgccggtctgacgattgctaacagcacagacttcattcccaaagtggaaggcaaagtgtttaccgcagagggctttgtgctcaaaccggatgttccaacgtggcttccgaacggtaatcgtgtcgccattaagtgtaagaactcgaaattctccgagaaaaagaaaagcgacaaacctatcaaagtagctgtggtgctgagtcaagatgatatggatctgatgtggcagtttaccgactatgtcactgttaatcgcattaacaacgtgatctctaagattggcgaagtgtcaccgaaagatttcgggaaagtaatgggcttaacggttcaggacattctggaagaagcagcacgtgaagaattggagctgaccgatgccgaaaatcccgtcgaggtgaagaaacaactggttgaatgcgtcaaagaaacattacgccatgtgtggatcgaactggtaagcaag

SEQ ID NO: 8 - protein, 346 aa, synthetic construct
  REGION 1..346: note = Engineered RNA ligase variants
MHHHHHHGGSGMFKKYSSLENHYNSKFIEKLRTNGLTGGEWVAREKIHGTNFSLIIERDAVTCAKRTGPILPAEDFYGYEIVLKNYADSIKSVQHLIESINYQSYQIYGEFAGTGIQKNVDYGDKDFYVFDIRVTKEDGSESVLTDTLMEAFCIIHKFKVAPCLATGSFEDLIKLPNDFDSVVPDYNFAVDNAGLTIANSTDFIPKVEGKVFTAEGFVLKPDVPTWLPNGNRVAIKCKNSKFSEKKKSDKPIKVAVVLSQDDMDLMWQFTDYVTVNRINNVISKIGEVSPKDFGKVMGLTVQDILEEAAREELELTDAENPVEVKKQLVECVKETLRHVWIELVSK

SEQ ID NO: 9 - DNA, 1035 bp, synthetic construct
  misc_feature 1..1035: note = Engineered RNA ligase variants
  source 1..1035: mol_type = other DNA
atgcatcaccatcaccatcacggtggcagcggtatgtttaagaaatattctagtctggaaaaccattacaataataaattcattgagaaattacgtacccacggcatgacggatggtgaatgggttgcgcgcgaaaagatccatggcaccaactttagcctgattattgaacgtgacgcagtgacttgcgctaaacgcacaggtccgatcctgccagccgaggatttctatgggtacgaaatcgtacttaagaactatgcggactcgattaaagcagtccaggaaatcatggaaacggcggccgctgtgagctaccaagtgtttggcgagttcgcgggaggaggcattcagaaaggtgtcgattatggtaccaaagacttctacgtgtttgatatcatcgttaccaccgaatcaggcgatgagacgtatgttgatgattatatgatgcactccttctgtaaatcgtttggctttaagattgctccgttgttgggtcgcggcaaatttgaagacctcattcagctgcctaatgatctggacagtgtagtaccggattacaacttcatggtcgacaatgtgggtctgactgaagcaaacagccatgtttggaaagcggaagccaaaggtgagacctttacagccgaagggtatgtgttaaagccctgctacccgaaatgggcgccaaatgggaaccgtgtcgccatcaagtgtaagaactccaaatttagcgagaagaagaaatctgataaaccgattaaagcgaaagtggaactgtcagaaatcgacaataatctgcttagcattctggcatgctatgttacgttaaaccgcgtgaacaacgtcatctcgaagattggcaaagttaccaccaaagatttcggcaaagtgatgggtctcacagtgcaagatattctggaagaaagtgcacgtgagggaatcactttggaacagacggacaatccttccgaggtcaagaaagaactgattgaaatggtaaaagaagttcttcgtccggtgtgggtagagctggttagc

SEQ ID NO: 10 - protein, 345 aa, synthetic construct
  REGION 1..345: note = Engineered RNA ligase variants
MHHHHHHGGSGMFKKYSSLENHYNNKFIEKLRTHGMTDGEWVAREKIHGTNFSLIIERDAVTCAKRTGPILPAEDFYGYEIVLKNYADSIKAVQEIMETAAAVSYQVFGEFAGGGIQKGVDYGTKDFYVFDIIVTTESGDETYVDDYMMHSFCKSFGFKIAPLLGRGKFEDLIQLPNDLDSVVPDYNFMVDNVGLTEANSHVWKAEAKGETFTAEGYVLKPCYPKWAPNGNRVAIKCKNSKFSEKKKSDKPIKAKVELSEIDNNLLSILACYVTLNRVNNVISKIGKVTTKDFGKVMGLTVQDILEESAREGITLEQTDNPSEVKKELIEMVKEVLRPVWVELVS

SEQ ID NO: 11 - DNA, 1035 bp, synthetic construct
  misc_feature 1..1035: note = Engineered RNA ligase variants
  source 1..1035: mol_type = other DNA
atgcatcaccatcaccatcacggtggcagcggtatgtttgagaaatatagtaccctggaaaaccattacaatggcaagttcattgaacgtatccgcaacgcgggttttgatgtgagcgaaacgtgggttgcccgcgagaagattcacgggaccaatttctccgtcatcgtgactaaagacaacattcagccggcaaaacgtacaggaccaatcttaccggcggaagatttcttcggctatatggtaattatgggtcgctacgacgagtcgtttaaagctgttcaagccgcacttaccggcgctacggtggcgtatcagatctttggtgaatttgcaggcggcgggattcagaaaggagtcgattacggtgagaaagatttctatgtgtttgacatcaaagttaccaccgaatctggtgaatcaagctatgtcgatgattttatgatggaacgtatgtgcaatgtattcggctttaagatggctcctttgctgggtcgcggcaaatttgacgacctgattcaaatcccgaacatgctggatgtggtggtcaaccgttacaatcaggcgattgaagcccatgggctcgaagaagcgaacacgatgcccttccaggccgtagttagcgagtcgaatattgcggaaggctatgtgctgaagccgtgttaccctaaattctttccgaacggtagtcgcgttgccatcaaatgcaagaattccaaattttcagagaaagcgaaaagcgataaaccaattaaagcaaaagtggaactgactgatgtcgacaaagttgccttctctacattagcagcatatgccacgttgaaccgtgtgaataatgtcatctcgaagattggccaagtaggtccgaaagattttgggaaagttatgggtctgaccgtgcaggatatcctcgaagaagctggacgcgaggagatttttattactgacgctgataaccccgtggtggtcaagaaagaactggttaactacgtacagggcgttatccgtccggtgtggatcgaacttgtcagcaac

SEQ ID NO: 12 - protein, 345 aa, synthetic construct
  REGION 1..345: note = Engineered RNA ligase variants
MHHHHHHGGSGMFEKYSTLENHYNGKFIERIRNAGFDVSETWVAREKIHGTNFSVIVTKDNIQPAKRTGPILPAEDFFGYMVIMGRYDESFKAVQAALTGATVAYQIFGEFAGGGIQKGVDYGEKDFYVFDIKVTTESGESSYVDDFMMERMCNVFGFKMAPLLGRGKFDDLIQIPNMLDVVVNRYNQAIEAHGLEEANTMPFQAVVSESNIAEGYVLKPCYPKFFPNGSRVAIKCKNSKFSEKAKSDKPIKAKVELTDVDKVAFSTLAAYATLNRVNNVISKIGQVGPKDFGKVMGLTVQDILEEAGREEIFITDADNPVVVKKELVNYVQGVIRPVWIELVSN

SEQ ID NO: 13 - DNA, 1038 bp, synthetic construct
  misc_feature 1..1038: note = Engineered RNA ligase variants
  source 1..1038: mol_type = other DNA
atgcatcaccatcaccatcacggtggcagcggtatgtttgcgaaatattcaagtctggaaaaccattacaataataagttcattgagaagatccgtggtgcaggcttcgatatgcacaccgtggaatgggtagctcgcgagaagattcatggaacgaactttagcgttatcattactccgaccgaaatcgtcccagccaaacgcacagggccgatcttggaaggcgagtcgttctttggtcacgaaattatcatgaagaaatataaagactccttcgtgaagatgcagaacatgctgaatgccatggatcttgttagcgtgcaaatctttggcgaatttgcgggtggtggcattcagaaaggcgtcgattacggagacaaagatttctatgtgtttgacatcctgtctgatagcgggaacgagaaagtttactgggatgactatgtagtcgaatcgtttgcaaccggcctcggtttaaaattagcgcctctgctgggacgtggtagtttcgctgaactgtcccagtacgtgaacgatttcaaaagcattgtgaactattataatgaattggttgatacgacggacctggaacatgccaataaacacgtctttggtccgcaagcgtcttctgaaactggcgtagcagaaggctacgttcttaaacccgtcaacccgaaattctttaataatggtacacgcgtggcgattaaatgcaagaactccaaattttcggagaaagccaagagcgacaaaccaattaaagcgaaagtggaactgaccgagaacgataaacgtgtgctcgaaatctttagcgagtatgttacctggaatcgcgtcagtaacgtactgtcacatattggctcagtgaccgccaaagattttgggcgtgttatgggtctgacgatgaaagacatcattaatgaagcagcacgcgaaggccatgatatgttgttcgctgataacccgtcggcggtgaagaaagagctgaccattctcatccagaacacgattcgttccaaatggcacgaagttctggag

SEQ ID NO: 14 - protein, 346 aa, synthetic construct
  REGION 1..346: note = Engineered RNA ligase variants
MHHHHHHGGSGMFAKYSSLENHYNNKFIEKIRGAGFDMHTVEWVAREKIHGTNFSVIITPTEIVPAKRTGPILEGESFFGHEIIMKKYKDSFVKMQNMLNAMDLVSVQIFGEFAGGGIQKGVDYGDKDFYVFDILSDSGNEKVYWDDYVVESFATGLGLKLAPLLGRGSFAELSQYVNDFKSIVNYYNELVDTTDLEHANKHVFGPQASSETGVAEGYVLKPVNPKFFNNGTRVAIKCKNSKFSEKAKSDKPIKAKVELTENDKRVLEIFSEYVTWNRVSNVLSHIGSVTAKDFGRVMGLTMKDIINEAAREGHDMLFADNPSAVKKELTILIQNTIRSKWHEVLE

SEQ ID NO: 15 - DNA, 1038 bp, synthetic construct
  misc_feature 1..1038: note = Engineered RNA ligase variants
  source 1..1038: mol_type = other DNA
atgcatcaccatcaccatcacggtggcagcggtatgtttaagaaatatagtagtctggaaaaccattacaataataaattcattagcaagatccgctttgagggcaaagatggtggtttatgggtggcgcgtgaaaagattcacggcaccaacttctcgatcatcgtctccaaagacagcgtttcggcctgcaaacgctcagggccgattctgccaagcgaaagcttctatggacatgagattattctcaagaactacgatgaatcgatcaagacgatccagcgttgtatgaacgcaaatgaacttggctctgtgtcctcctaccaaatctttggtgaatttgctggccagggcattcagaaagaggtagactatggtgagaaagatttctatgtgtttgatattctggttaacacccaaaatggaaacgtcctgtatatggacgacatgatgatgactagcttctgcaacgaatttgggttcaagatggcgccgtttattggttgtggcagtttcgatgaattgattcagctgcccaataattttacatctgtgatcaaagcctacaacgaagcggcgaaagatgatttgaaagaggtaaatctgtgcgtctttgatccgttagttaccgacgacaacgtggcagaaggctatgttctgaaacctgtctacccggatttctttaataatggtacgcgcatcgccatcaaaagcaagaactctcgtttcaccgagaagaagaaatcggacaaaccaatcaaaccgaaagctgtacttacgtccaacgattcaactgtgctggcaaacctgtgtgaatattcaacctggaatcgcgtgagcaacgttatttcccacattggagaagtcaaagcgaaagattttgggaaagtgatgggtttgacaattcaggatatctttatcgaagccaaacgtgaaggcgttgacattgtacatgcggataacccggatctcgtgaaacgcgagctgcaaaccgtcgtctcgaatacgatccgtgagaaatggctggaaattgtgtcg

SEQ ID NO: 16 - protein, 346 aa, synthetic construct
  REGION 1..346: note = Engineered RNA ligase variants
MHHHHHHGGSGMFKKYSSLENHYNNKFISKIRFEGKDGGLWVAREKIHGTNFSIIVSKDSVSACKRSGPILPSESFYGHEIILKNYDESIKTIQRCMNANELGSVSSYQIFGEFAGQGIQKEVDYGEKDFYVFDILVNTQNGNVLYMDDMMMTSFCNEFGFKMAPFIGCGSFDELIQLPNNFTSVIKAYNEAAKDDLKEVNLCVFDPLVTDDNVAEGYVLKPVYPDFFNNGTRIAIKSKNSRFTEKKKSDKPIKPKAVLTSNDSTVLANLCEYSTWNRVSNVISHIGEVKAKDFGKVMGLTIQDIFIEAKREGVDIVHADNPDLVKRELQTVVSNTIREKWLEIVS

SEQ ID NO: 17 - DNA, 1050 bp, synthetic construct
  misc_feature 1..1050: note = Engineered RNA ligase variants
  source 1..1050: mol_type = other DNA
atgcatcaccatcaccatcacggtggcagcggtatgacctttaagaaatatagtagtctggaaaaccatacgaatggcaaattcattcaggcgtgctttgatgtggccgcccaaaacggtggtaacgcatgtgagttcgttgctcgcgaaaagatccacggcaccaatttcagcattatcatcactaaagacaatattcaggcgtgcaaacgttcaggaccgattggcccaacagagaaattctttgggtacgaagatgtcatgaaagacttagatgatgtgtttaaagcggtacagaaactgctgatcgacaacggtgatggctggaactccatgcaaatctttggtgaatatgcaggcgggaatattcagaaggaagttgattacggtccgaaaagcttctatgtctttgacatctttttggatgctcctgcagcgggcatttctaatggatggtgggatgatcgctcggtgcaggccttctgtgaacatcatggcctcaagattgcaccgctgattgcgcacggtagccttgagcaactgctgaaattacccgtggaatttaacaccatcgttccgtctcttacgtgggacaacatgtacgggtatcatgcgcagcctgctccaaccgacaatgtaggcgaaggtctggtcattaaaccggtgtatccgctctttttgaacaacggttcgcgtgttgccatcaaatacaagacggacaaattcaaagagaaaggcaaaggaaaactgcccaagattccggtgccactgtccgaagccgataaagatctgctgaataaattgagcgaattctcaactaaagcgcgcatctcgaatgtagcctcacatatcggggagttaaacccgaagatgtttgggaaactgctgggtatgaccatgcatgatcttctcacagaagcagaacgtgagggcatctccattaatcaggctgaagcgccgagtaaactgaaaggtgaattgcaaaagattgtccaggttgatgtgcgcgagtattggaccgaacaggactttgcggtgcacaaagtcgag

SEQ ID NO: 18 - protein, 350 aa, synthetic construct
  REGION 1..350: note = Engineered RNA ligase variants
MHHHHHHGGSGMTFKKYSSLENHTNGKFIQACFDVAAQNGGNACEFVAREKIHGTNFSIIITKDNIQACKRSGPIGPTEKFFGYEDVMKDLDDVFKAVQKLLIDNGDGWNSMQIFGEYAGGNIQKEVDYGPKSFYVFDIFLDAPAAGISNGWWDDRSVQAFCEHHGLKIAPLIAHGSLEQLLKLPVEFNTIVPSLTWDNMYGYHAQPAPTDNVGEGLVIKPVYPLFLNNGSRVAIKYKTDKFKEKGKGKLPKIPVPLSEADKDLLNKLSEFSTKARISNVASHIGELNPKMFGKLLGMTMHDLLTEAEREGISINQAEAPSKLKGELQKIVQVDVREYWTEQDFAVHKVE

SEQ ID NO: 19 - DNA, 1050 bp, synthetic construct
  misc_feature 1..1050: note = Engineered RNA ligase variants
  source 1..1050: mol_type = other DNA
atgcatcaccatcaccatcacggtggcagcggtatgtttaagaaatatagtagcctgaccaaccattacgaaggcaaattcatcaatggtgtgattatgaacgggttaacgggtggcgtttgggtagcgcgcgagaagattcacggcgccaacttctcgtttatcactgatgatggaattaccgttactccggcaaaacgtacagacgtcgtgaaaccagctgaagacttctatggttgctcagcggtggtggccaaatactctcctggcatccgcaagatgtgggaaaccctgaagaagacggggacctatgatgatctcgtcattcaggtatacggtgagtttgcaggacgtggcgtgcaaaaagatgttgactatggtgagaaagacttctacgtctttgatatccgcgttaatggcgaatttttgccggataacctgtgttcccttattagccgttcccatggcctgaaaatggcgccgctgctgggttatgggacgttcgaagaaatcaaagaattgcccattacctttgaaagcgtggtgaataaagccaatagtggcattggctcggacaacacagtctatggtgagtttgtttacccgatcatggatgtagaagaaggtaacattgctgaggggttcgtgatgaaaccagtctctccggcgtttatgcctaatggagaacgcgttgcaatcaaatgcaagaccaccaaatttacggagaagaaagcgaagaaagccactcgtttcaacgctccggtgtcattaagcgagaaagacaagaatcagctggatgaattcgtctgttatctcacggaaaaccgcgtgaagaatgtactgtcgaaacttgatctggcgagcattaccgccaaagattttggtcgtatcatgggcttgaccgttcaggacgcgatcgaagaaattagtcgcaatcacggcccctttctggagcaattcgaagatccagcaatggccaagaaactgtttgtgacagaagcacagaacatgattcgtccggtttggggcaagatcctcaaccatgaattc

SEQ ID NO: 20 - protein, 350 aa, synthetic construct
  REGION 1..350: note = Engineered RNA ligase variants
MHHHHHHGGSGMFKKYSSLTNHYEGKFINGVIMNGLTGGVWVAREKIHGANFSFITDDGITVTPAKRTDVVKPAEDFYGCSAVVAKYSPGIRKMWETLKKTGTYDDLVIQVYGEFAGRGVQKDVDYGEKDFYVFDIRVNGEFLPDNLCSLISRSHGLKMAPLLGYGTFEEIKELPITFESVVNKANSGIGSDNTVYGEFVYPIMDVEEGNIAEGFVMKPVSPAFMPNGERVAIKCKTTKFTEKKAKKATRFNAPVSLSEKDKNQLDEFVCYLTENRVKNVLSKLDLASITAKDFGRIMGLTVQDAIEEISRNHGPFLEQFEDPAMAKKLFVTEAQNMIRPVWGKILNHEF

SEQ ID NO: 21 - DNA, 1032 bp, synthetic construct
  misc_feature 1..1032: note = Engineered RNA ligase variants
  source 1..1032: mol_type = other DNA
atgcatcaccatcaccatcacggtggcagcggtatgatctttgtgaaatataattctctggaaaaccattaccgtcagaacgtcattgattcgttcaccaccagcggctatactgcgaaaggtgttgagtgggtagccatggaaaagattcacgggacgaactttcaacttgcagtgaatgacgaacatgttcaggctggccgccgcacggatctgatcggtgacttcgatcagttctacgaggcggatctcatcgtgaagaaatatcacgacaacgcccgtaaagtctacgattttgtcaaacagaaacatccggaagtggatcaagtgaccatttttggcgaatatgcgggaaatttaaccacaggtaagatgattcagaaagaagtagagtatggcgaccaagatttctacgtgtttgacatctttattttcagtggtgaaacggggatgtatctgtcccacgattttgttatggaatcaattcgcggcatcttcaaacatgcaccagttatttaccgtggcgattttgatggtgtcaccaaattgccgaatgacttccagagcgtagtgatccctaacaacaaagagggaaaatttggtctggttgttggcactgacaatattgctgaagggtttgtggcgaagacagtagatccgcattatacgcgccaaggtcgtaccatcttcaaaagcaagaactcgaaatttaccgagaaaggcaaatccgataaacccgtgaaagtcaaagaaccgctgggcgaatctgatttagccatggtccacgaaatcgcagagtacattaatgttaaccgcctgaagaatgtgctgagcaagattggtatcccaacgacgaaagaattcggaaaagtgtcaggcaacctcagtaaagacgcgattgaagacttcaccaaggataccaacaagaatttgcgtgatgccgaacgtccgtcggatgttggtaaagctgtcaataatcttgcgggcgagctggtacgcgagcattggatgaacattctggatgggaacttc

SEQ ID NO: 22 - protein, 344 aa, synthetic construct
  REGION 1..344: note = Engineered RNA ligase variants
MHHHHHHGGSGMIFVKYNSLENHYRQNVIDSFTTSGYTAKGVEWVAMEKIHGTNFQLAVNDEHVQAGRRTDLIGDFDQFYEADLIVKKYHDNARKVYDFVKQKHPEVDQVTIFGEYAGNLTTGKMIQKEVEYGDQDFYVFDIFIFSGETGMYLSHDFVMESIRGIFKHAPVIYRGDFDGVTKLPNDFQSVVIPNNKEGKFGLVVGTDNIAEGFVAKTVDPHYTRQGRTIFKSKNSKFTEKGKSDKPVKVKEPLGESDLAMVHEIAEYINVNRLKNVLSKIGIPTTKEFGKVSGNLSKDAIEDFTKDTNKNLRDAERPSDVGKAVNNLAGELVREHWMNILDGNF

SEQ ID NO: 23 - DNA, 1038 bp, synthetic construct
  misc_feature 1..1038: note = Engineered RNA ligase variants
  source 1..1038: mol_type = other DNA
atgcatcaccatcaccatcacggtggcagcggtatgtttgcaaaatattcaagtctggaaaaccattacaataataagttcattgagaagatccgtggtgcaggcttcgatatgcacaccgtggaatgggtagctcgcgagaagattcatggaacgaactttagcgttatcattactccgaccgaaatcgtcccagccaaacgcacagggccgatcttggaaggcgagtcgttctttggtcacgaaattatcatgaagaaatataaagactccttcgtgaagatgcagaacatgctgaatgccatggatcttgttagcgtgcaaatctttggcgaatttgcgggtggtggcattcagaaaggcgtcgattacggagacaaagatttctatgtgtttgacatcctgtctgatagcgggaacgagaaagtttactgggatgactatgtagtcgaatcgtttgcaaccggcctcggtttaaaattagcgcctctgctgggacgtggtagtttcgctgaactgtcccagtacccaaacgatttcaaaagcattgtgaactattataatgaattggttgatacgacggacctggaacatgccaataaacacgtctttggtccgcaagcgtcttctgaaactggcgtagcagaaggctacgttcttaaacccgtcaacccgaaattctttaataatggtacacgcgtggcgattaaatgcaagaactccaaattttcggagaaagccaagagcgacaaaccaattaaagcgaaagtggaactgtcggagaacgataaacgtgtgctcgaaatctttagcgagtatgttacctggaatcgcgtcagtaacgtactgtcacatattggctcagtgaccgccaaagattttgggcgtgttatgggtctgacgatgaaagacatcattgaggaagcagcacgcgaaggccatgatatgttgttcgctgataacccgtcggcggtgaagaaagagctgaccattctcatccagaacacgattcgttccaaatggcacgaagtggtggag

SEQ ID NO: 24 - protein, 346 aa, synthetic construct
  REGION 1..346: note = Engineered RNA ligase variants
MHHHHHHGGSGMFAKYSSLENHYNNKFIEKIRGAGFDMHTVEWVAREKIHGTNFSVIITPTEIVPAKRTGPILEGESFFGHEIIMKKYKDSFVKMQNMLNAMDLVSVQIFGEFAGGGIQKGVDYGDKDFYVFDILSDSGNEKVYWDDYVVESFATGLGLKLAPLLGRGSFAELSQYPNDFKSIVNYYNELVDTTDLEHANKHVFGPQASSETGVAEGYVLKPVNPKFFNNGTRVAIKCKNSKFSEKAKSDKPIKAKVELSENDKRVLEIFSEYVTWNRVSNVLSHIGSVTAKDFGRVMGLTMKDIIEEAAREGHDMLFADNPSAVKKELTILIQNTIRSKWHEVVE

SEQ ID NO: 25 - DNA, 1038 bp, synthetic construct
  misc_feature 1..1038: note = Engineered RNA ligase variants
  source 1..1038: mol_type = other DNA
atgcatcaccatcaccatcacggtggcagcggtatgtttgcgaaatattcaagtctggaaaaccattacaataataagttcattgagaagatccgtggtgcaggcttcgatatgcacaccgtggaatgggtagctcgcgagaagattcatggaacgaactttagcgttatcattactccgaccgaaattgtcccagccaaacgcacagggccgatcttggaaggcgagtcgttctttggtcacgaaattatcatgaagaaatataaagactccttcgtgaagatgcagaacatgctgaatgccatggatcttgttagcgtgcaaatctttggcgaatttgcgggtggtggcattcagaaaggcgtcgattacggagacaaagatttctatgtgtttgacatcctgtctgatagcgggaacgagaaagtttactgggatgactatgtagtcgaatcgtttgcaaccggcctcggtttaaaattagcgcctctgctgggacgtggtagtttcgaggaactgtccaaatacgtgaacgatttcaaaagcgtcgtgaactattataatgaattggttgatacgacggacctggaacatgccaataaacacgtctttggtccgcaagcgtcttctgaaactggcgtagcagaaggctacgttcttaaacccgtcaacccgaaattctttaataatggtacacgcgtggcgattaaatgcaagaactccaaattttcggagaaagccaagagcgacaaaccaattaaagcgaaagtggaactgaccgagaacgataaacgtgtgctcgaaatctttagcgagtatgttacctggaatcgcgtcaacaacgtaatttcacatattggctcagtgaccgccaaagattttgggcgtgttatgggtctgacgatgcaagacatcattaatgaagcagcacgcgaaggccatgatatgttgttcgctgataacccgtcggcggtgaagaaagagctgaccattctcatccagaacacgattcgttccaaatggcacgaagttctggag

SEQ ID NO: 26 - protein, 346 aa, synthetic construct
  REGION 1..346: note = Engineered RNA ligase variants
MHHHHHHGGSGMFAKYSSLENHYNNKFIEKIRGAGFDMHTVEWVAREKIHGTNFSVIITPTEIVPAKRTGPILEGESFFGHEIIMKKYKDSFVKMQNMLNAMDLVSVQIFGEFAGGGIQKGVDYGDKDFYVFDILSDSGNEKVYWDDYVVESFATGLGLKLAPLLGRGSFEELSKYVNDFKSVVNYYNELVDTTDLEHANKHVFGPQASSETGVAEGYVLKPVNPKFFNNGTRVAIKCKNSKFSEKAKSDKPIKAKVELTENDKRVLEIFSEYVTWNRVNNVISHIGSVTAKDFGRVMGLTMQDIINEAAREGHDMLFADNPSAVKKELTILIQNTIRSKWHEVLE

SEQ ID NO: 27 - DNA, 1038 bp, synthetic construct
  misc_feature 1..1038: note = Engineered RNA ligase variants
  source 1..1038: mol_type = other DNA
atgcatcaccatcaccatcacggtggcagcggtatgtttgcaaaatattcaagtctggaaaaccattacaataataagttcattgagaagatccgtggtgcaggcttcgatatgcacaccgtggaatgggtagctcgcgagaagattcatggaacgaactttagcgttatcattactccgaccgaaatcgtcccagccaaacgcacagggccgatcttggaaggcgagtcgttctttggtcacgaaattatcatgaagaaatataaagactccttcgtgaaggtgcagaacatgctgaatgccatggatcttgttagcgtgcaaatctttggcgaatttgcgggtggtggcattcagaaaggcgtcgattacggagacaaagatttctatgtgtttgacatcctgtctgatagcgggaacgagaaagtttactgggatgactatgtagtcgaatcgtttgcaaccggcctcggtttcaaattagcgcctctgctgggacgtggtagtttcgctgaactgtcccagtacccaaacgatttcaaaagcattgtgaactattataatgaattggttgatacgacggacctggaacatgccaataaacacgtctttggtccgcaagcgtcttctgaaactggcgtagcagaaggctacgttcttaaacccgtcaacccgaaattctttaataatggtacacgcgtggcgattaaatgcaagaactccaaattttcggagaaagccaagagcgacaaaccaattaaagcgaaagtggaactgtcggagaacgataaacgtgtgctcgaaatctttagcgagtatgttacctggaatcgcgtcagtaacgtactgtcacacattggcgaggtgaccgcaaaagattttgggcgtgttatgggtctgacgatgaaagacatcattaatgaagcagcacgcgaaggccatgatatgttgttcgctgataacccgtcggcggtgaagaaagagctgaccattctcatccagaacacgattcgttccaaatggcacgaagttctggag

SEQ ID NO: 28 - protein, 346 aa, synthetic construct
  REGION 1..346: note = Engineered RNA ligase variants
MHHHHHHGGSGMFAKYSSLENHYNNKFIEKIRGAGFDMHTVEWVAREKIHGTNFSVIITPTEIVPAKRTGPILEGESFFGHEIIMKKYKDSFVKVQNMLNAMDLVSVQIFGEFAGGGIQKGVDYGDKDFYVFDILSDSGNEKVYWDDYVVESFATGLGFKLAPLLGRGSFAELSQYPNDFKSIVNYYNELVDTTDLEHANKHVFGPQASSETGVAEGYVLKPVNPKFFNNGTRVAIKCKNSKFSEKAKSDKPIKAKVELSENDKRVLEIFSEYVTWNRVSNVLSHIGEVTAKDFGRVMGLTMKDIINEAAREGHDMLFADNPSAVKKELTILIQNTIRSKWHEVLE

SEQ ID NO: 29 - DNA, 1038 bp, synthetic construct
  misc_feature 1..1038: note = Engineered RNA ligase variants
  source 1..1038: mol_type = other DNA
atgcatcaccatcaccatcacggtggcagcggtatgtttgcgaaatattcaagtctggaaaaccattacaataataagttcattgagaagatccgtggtgcaggcttcgatatgcacaccgtggaatgggtagctcgcgagaagattcatggaacgaactttagcgttatcattactccgaccgaaattgtcccagccaaacgcacagggccgatcttggaaggcgagtcgttctttggtcacgaaattatcatgaagaaatataaagactcctttgtgaagatgcagaacatgctgaatgccatggatcttgttagcgtgcaaatctttggcgaatttgcgggtggtggcattcagaaaggcgtcgattacggagacaaagatttctatgtgtttgacatcctgtctgatagcgggaacgagaaagtttactgggatgactatgtagtcgaatcgtttgcaaccggcctcggtttaaaattagcgcctctgctgggacgtggtagtttcgcggaactgtccaaatacgtgaacgatttcaaaagcgtcgtgaactattataatgaattggttgatacgacggacctggaacatgccaataaacacgtctttggtccgcaagcgtcttctgaaactggcgtagcagaaggctacgttcttaaacccgtcaacccgaaattctttaataatggtacacgcgtggcgattaaatgcaagaactccaaattttcggagaaaaaaaagagcgacaaaccaattaaagcgaaagtggaactgaccgagaacgataaacgtgtgctcgaaatctttagcgagtatgttacctggaatcgcgtcaacaacgtaatttcacatattggctcagtgaccgccaaagattttgggaaagttatgggtctgacgatgaaagacatcattaatgaagcagcacgcgaaggccatgatatgttgttcgctgataacccgtcggcggtgaagaaagagctgaccattctcatccagaacacgattcgttccaaatggcacgaagttctggag

SEQ ID NO: 30 - protein, 346 aa, synthetic construct
  REGION 1..346: note = Engineered RNA ligase variants
MHHHHHHGGSGMFAKYSSLENHYNNKFIEKIRGAGFDMHTVEWVAREKIHGTNFSVIITPTEIVPAKRTGPILEGESFFGHEIIMKKYKDSFVKMQNMLNAMDLVSVQIFGEFAGGGIQKGVDYGDKDFYVFDILSDSGNEKVYWDDYVVESFATGLGLKLAPLLGRGSFAELSKYVNDFKSVVNYYNELVDTTDLEHANKHVFGPQASSETGVAEGYVLKPVNPKFFNNGTRVAIKCKNSKFSEKKKSDKPIKAKVELTENDKRVLEIFSEYVTWNRVNNVISHIGSVTAKDFGKVMGLTMKDIINEAAREGHDMLFADNPSAVKKELTILIQNTIRSKWHEVLE

SEQ ID NO: 31 - DNA, 1038 bp, synthetic construct
  misc_feature 1..1038: note = Engineered RNA ligase variants
  source 1..1038: mol_type = other DNA
atgcatcaccatcaccatcacggtggcagcggtatgtttgcaaaatattcaagtctggaaaaccattacaataataagttcattgagaagatccgtggtgcaggcttcgatatgcacaccgtggaatgggtagctcgcgagaagattcatggaacgaactttagcgttatcattactccgaccgaaatcgtcccagccaaacgcacagggccgatcttggaaggcgagtcgttctttggtcacgaaattatcatgaagaaatataaagactccttcgtgaagatgcagaacatgctgaatgccatggatcttgttagcgtgcaaatctttggcgaatttgcgggtggtggcattcagaaaggcgtcgattacggagacaaagatttctatgtgtttgacatcctgtctgatagcgggaacgagaaagtttactgggatgactatgtagtcgaatcgtttgcaaccggcctcggtttaaaattagcgcctctgctgggacgtggtagtttcgctgaactgtcccagtacccaaacgatttcaaaagcattgtgaactattataatgaattggttgatacgacggacctggaacatgccaataaacacgtctttggtccgcaagcgtcttctgaaactggcgtagcagaaggctacgttcttaaacccgtcaacccgaaattctttaataatggtacacgcgtggcgattaaatgcaagaactccaaattttcggagaaagccaagagcgacaaaccaattaaagcgaaagtggaactgaccgagaacgataaacgtgtgctcgaaatctttagcgagtatgttacctggaatcgcgtcagtaacgtactgtcacatattggctcagtgaccgccaaagattttgggcgtgttatgggtctgacgatgaaagacatcattgaggaagcagcacgcgaaggccatgatatgttgttcgctgataacccgtcggcggtgaagaaagagctgaccattctcatccagaacacgattcgttccaaatggcacgaagttctggag

SEQ ID NO: 32 - protein, 346 aa, synthetic construct
  REGION 1..346: note = Engineered RNA ligase variants
MHHHHHHGGSGMFAKYSSLENHYNNKFIEKIRGAGFDMHTVEWVAREKIHGTNFSVIITPTEIVPAKRTGPILEGESFFGHEIIMKKYKDSFVKMQNMLNAMDLVSVQIFGEFAGGGIQKGVDYGDKDFYVFDILSDSGNEKVYWDDYVVESFATGLGLKLAPLLGRGSFAELSQYPNDFKSIVNYYNELVDTTDLEHANKHVFGPQASSETGVAEGYVLKPVNPKFFNNGTRVAIKCKNSKFSEKAKSDKPIKAKVELTENDKRVLEIFSEYVTWNRVSNVLSHIGSVTAKDFGRVMGLTMKDIIEEAAREGHDMLFADNPSAVKKELTILIQNTIRSKWHEVLE

SEQ ID NO: 33 - DNA, 1038 bp, synthetic construct
  misc_feature 1..1038: note = Engineered RNA ligase variants
  source 1..1038: mol_type = other DNA
atgcatcaccatcaccatcacggtggcagcggtatgtttgcgaaatattcaagtctggaaaaccattacaataataagttcattgagaagatccgtggtgcaggcttcgatatgcacaccgtggaatgggtagctcgcgagaagattcatggaacgaactttagcgttatcattactccgaccgaaattgtcccagccaaacgcacagggccgatcttggaaggcgagtcgttctttggttacgaaattatcatgaagaaatataaagactccttcgtgaagatgcagaacatgctgaatgccatggatcttgttagcgtgcaaatctttggcgaatttgcgggtggtggcattcagaaaggcgtcgattacggagacaaagatttctatgtgtttgacatcctgtctgatagcgggaacgagaaagtttactgggatgactatgtagtcgaatcgtttgcaaccggcctcggtttaaaattagcgcctctgctgggacgtggtagtttcgaggaactgtcccaatacgtgaacgatttcaaaagcgtcgtgaactattataatgaattggttgatacgacggacctggaacatgccaataaacacgtctttggtccgcaagcgtcttctgaaactggcgtagcagaaggctacgttcttaaacccgtcaacccgaaattctttaataatggtacacgcgtggcgattaaatgcaagaactccaaattttcggagaaagctaagagcgacaaaccaattaaagcgaaagtggaactgaccgagaacgataaacgtgtgctcgaaatctttagcgagtatgttacctggaatcgcgtcagcaacgtactgtcacatattggctcagtgaccgccaaagattttgggcgtgttatgggtctgacgatgaaagacatcattaatgaagcagcacgcgaaggccatgatatgttgttcgctgataacccgtcggcggtgaagaaagagctgaccattctcatccaggacacgattcgttcgaaatggcacgaagttctggag

SEQ ID NO: 34 - protein, 346 aa, synthetic construct
  REGION 1..346: note = Engineered RNA ligase variants
MHHHHHHGGSGMFAKYSSLENHYNNKFIEKIRGAGFDMHTVEWVAREKIHGTNFSVIITPTEIVPAKRTGPILEGESFFGYEIIMKKYKDSFVKMQNMLNAMDLVSVQIFGEFAGGGIQKGVDYGDKDFYVFDILSDSGNEKVYWDDYVVESFATGLGLKLAPLLGRGSFEELSQYVNDFKSVVNYYNELVDTTDLEHANKHVFGPQASSETGVAEGYVLKPVNPKFFNNGTRVAIKCKNSKFSEKAKSDKPIKAKVELTENDKRVLEIFSEYVTWNRVSNVLSHIGSVTAKDFGRVMGLTMKDIINEAAREGHDMLFADNPSAVKKELTILIQDTIRSKWHEVLE

SEQ ID NO: 35 - DNA, 1038 bp, synthetic construct
  misc_feature 1..1038: note = Engineered RNA ligase variants
  source 1..1038: mol_type = other DNA
atgcatcaccatcaccatcacggtggcagcggtatgtttgcgaaatattcaagtctggaaaaccattacaataataagttcattgagaagatccgtggtgcaggcttcgatatgcacaccgtggaatgggtagctcgcgagaagattcatggaacgaactttagcgttatcattactccgaccgaaattgtcccagccaaacgcacagggccgatcttggaaggcgagtcgttctttggtcacgaaattatcatgaagaaatataaagactcctttgtgaagatgcagaacatgctgaatgccatggatcttgttagcgtgcaaatctttggcgaatttgcgggtggtggcattcagaaaggcgtcgattacggagacaaagatttctatgtgtttgacatcctgtctgatagcgggaacgagaaagtttactgggatgactatgtagtcgaatcgtttgcaaccggcctcggtttaaaattagcgcctctgctgggacgtggtagtttcgcggaactgtccaaatacgtgaacgatttcaaaagcgtcgtgaactattataatgaattggttgatacgacggacctggaacatgccaataaacacgtctttggtccgcaagcgtcttctgaaactggcgtagcagaaggctacgttcttaaacccgtcaacccgaaattctttaataatggtacacgcgtggcgattaaatgcaagaactccaaattttcggagaaagccaagagcgacaaaccaattaaagcgaaagtggaactgaccgagaacgataaacgtgtgctcgaaatctttagcgagtatgttacctggaatcgcgtcagtaacgtactgtcacatattggctcagtgaccgccaaagattttgggcgtgttatgggtctgacgatgaaagacatcattaatgaagcagcacgcgaaggccatgatatgttgttcgctgataacccgtcggcggtgaagaaagagctgaccattctcatccagaacacgattcgttcgaaatggcacgaagttctggag

SEQ ID NO: 36 - protein, 346 aa, synthetic construct
  REGION 1..346: note = Engineered RNA ligase variants
MHHHHHHGGSGMFAKYSSLENHYNNKFIEKIRGAGFDMHTVEWVAREKIHGTNFSVIITPTEIVPAKRTGPILEGESFFGHEIIMKKYKDSFVKMQNMLNAMDLVSVQIFGEFAGGGIQKGVDYGDKDFYVFDILSDSGNEKVYWDDYVVESFATGLGLKLAPLLGRGSFAELSKYVNDFKSVVNYYNELVDTTDLEHANKHVFGPQASSETGVAEGYVLKPVNPKFFNNGTRVAIKCKNSKFSEKAKSDKPIKAKVELTENDKRVLEIFSEYVTWNRVSNVLSHIGSVTAKDFGRVMGLTMKDIINEAAREGHDMLFADNPSAVKKELTILIQNTIRSKWHEVLE

SEQ ID NO: 37 - DNA, 1038 bp, synthetic construct
  misc_feature 1..1038: note = Engineered RNA ligase variants
  source 1..1038: mol_type = other DNA
atgcatcaccatcaccatcacggtggcagcggtatgtttgcgaaatattcaagtctggaaaaccattacaataataagttcattgagaagatccgtggtgcaggcttcgatatgcacaccgtggaatgggtagctcgcgagaagattcatggaacgaactttagcgttatcattactccgaccgaaattgtcccagccaaacgcacagggccgatcttggaaggcgagtcgttctttggttacgaaattatcatgaagaaatataaagactcctttgtgaagatgcagaacatgctgaatgccatggatcttgttagcgtgcaaatctttggcgaatttgcgggtggtggcattcagaaaggcgtcgattacggagacaaagatttctatgtgtttgacatcctgtctgatagcgggaacgagaaagtttactgggatgactatgtagtcgaatcgtttgcaaccggcctcggtttaaaattagcgcctctgctgggacgtggtagtttcgcggaactgtccaaatacgtgaacgatttcaaaagcgtcgtgaactattataatgaattggttgatacgacggacctggaacatgccaataaacacgtctttggtccgcaagcgtcttctgaaactggcgtagcagaaggctacgttcttaaacccgtcaacccgaaattctttaataatggtacacgcgtggcgattaaatgcaagaactccaaattttcggagaaagctaagagcgacaaaccaattaaagcgaaagtggaactgaccgagaacgataaacgtgtgctcgaaatctttagcgagtatgttacctggaatcgcgtcaacaacgtactgtcacatattggctcagtgaccgccaaagattttgggaaagttatgggtctgacgatgaaagacatcattaatgaagcagcacgcgaaggccatgatatgttgttcgctgataacccgtcggcggtgaagaaagagctgaccattctcatccaggacacgattcgtccgaaatggcacgaagttctggag

SEQ ID NO: 38 - protein, 346 aa, synthetic construct
  REGION 1..346: note = Engineered RNA ligase variants
MHHHHHHGGSGMFAKYSSLENHYNNKFIEKIRGAGFDMHTVEWVAREKIHGTNFSVIITPTEIVPAKRTGPILEGESFFGYEIIMKKYKDSFVKMQNMLNAMDLVSVQIFGEFAGGGIQKGVDYGDKDFYVFDILSDSGNEKVYWDDYVVESFATGLGLKLAPLLGRGSFAELSKYVNDFKSVVNYYNELVDTTDLEHANKHVFGPQASSETGVAEGYVLKPVNPKFFNNGTRVAIKCKNSKFSEKAKSDKPIKAKVELTENDKRVLEIFSEYVTWNRVNNVLSHIGSVTAKDFGKVMGLTMKDIINEAAREGHDMLFADNPSAVKKELTILIQDTIRPKWHEVLE

SEQ ID NO: 39 - DNA, 1038 bp, synthetic construct
  misc_feature 1..1038: note = Engineered RNA ligase variants
  source 1..1038: mol_type = other DNA
atgcatcaccatcaccatcacggtggcagcggtatgtttgcgaaatattcaagtctggaaaaccattacaataataagttcattgagaagatccgtggtgcaggcttcgatatgcacaccgtggaatgggtagctcgcgagaagattcatggaacgaactttagcgttatcattactccgaccgaaattgtcccagccaaacgcacagggccgatcttggaaggcgagtcgttctttggttacgaaattatcatgaagaaatataaagactcctttgtgaagatgcagaacatgctgaatgccatggatcttgttagcgtgcaaatctttggcgaatttgcgggtggtggcattcagaaaggcgtcgattacggagacaaagatttctatgtgtttgacatcctgtctgatagcgggaacgagaaagtttactgggatgactatgtagtcgaatcgtttgcaaccggcctcggtttaaaattagcgcctctgctgggacgtggtagtttcgcggaactgtcccaatacgtgaacgatttcaaaagcgtcgtgaactattataatgaattggttgatacgacggacctggaacatgccaataaacacgtctttggtccgcaagcgtcttctgaaactggcgtagcagaaggctacgttcttaaacccgtcaacccgaaattctttaataatggtacacgcgtggcgattaaatgcaagaactccaaattttcggagaaaaaaaagagcgacaaaccaattaaagcgaaagtggaactgaccgagaacgataaacgtctgctcgaaatctttagcgagtatgttacctggaatcgcgtcagcaacgtactgtcacatattggctcagtgaccgccaaagattttgggcgtgttatgggtctgacgatgaaagacatcattaatgaagcagcacgcgaaggccatgatatgttgttcgctgataacccgtcggcggtgaagaaagagctgaccattctcatccagaacacgattcgttcgaaatggcacgaagttctggag

SEQ ID NO: 40 - protein, 346 aa, synthetic construct
  REGION 1..346: note = Engineered RNA ligase variants
MHHHHHHGGSGMFAKYSSLENHYNNKFIEKIRGAGFDMHTVEWVAREKIHGTNFSVIITPTEIVPAKRTGPILEGESFFGYEIIMKKYKDSFVKMQNMLNAMDLVSVQIFGEFAGGGIQKGVDYGDKDFYVFDILSDSGNEKVYWDDYVVESFATGLGLKLAPLLGRGSFAELSQYVNDFKSVVNYYNELVDTTDLEHANKHVFGPQASSETGVAEGYVLKPVNPKFFNNGTRVAIKCKNSKFSEKKKSDKPIKAKVELTENDKRLLEIFSEYVTWNRVSNVLSHIGSVTAKDFGRVMGLTMKDIINEAAREGHDMLFADNPSAVKKELTILIQNTIRSKWHEVLE

SEQ ID NO: 41 - DNA, 1038 bp, synthetic construct
  misc_feature 1..1038: note = Engineered RNA ligase variants
  source 1..1038: mol_type = other DNA
atgcatcaccatcaccatcacggtggcagcggtatgtttgcgaaatattcaagtctggaaaaccattacaataataagttcattgagaagatccgtggtgcaggcttcgatatgcacaccgtggaatgggtagctcgcgagaagattcatggaacgaactttagcgttatcattactccgaccgaaatcgtcccagccaaacgcacagggccgatcttggaaggcgagtcgttctttggtcacgaaattatcatgaagaaatataaagactccttcgtgaaggtgcagaacatgctgaatgccatggatcttgttagcgtgcaaatctttggcgaatttgcgggtggtggcattcagaaaggcgtcgattacggagacaaagatttctatgtgtttgacatcctgtctgatagcgggaacgagaaagtttactgggatgactatgtagtcgaatcgtttgcaaccggcctcggtctgaaattagcgcctctgctgggacgtggtagtttcgctgaactgtcccagtacccaaacgatttcaaaagcattgtgaactattataatgaattggttgatacgacggacctggaacatgccaataaacacgtctttggtccgcaagcgtcttctgaaactggcgtagcagaaggctacgttcttaaacccgtcaacccgaaattctttaataatggtacacgcgtggcgattaaatgcaagaactccaaattttcggagaaagccaagagcgacaaaccaattaaagcgaaagtggaactgacggagaacgataaacgtgtgctcgaaatctttagcgagtatgttacctggaatcgcgtcagtaacgtactgtcacatattggctcagtgaccgcaaaagattttgggcgtgttatgggtctgacgatgaaagacatcattaatgaagcagcacgcgaaggccatgatatgttgttcgctgataacccgtcggcggtgaagaaagagctgaccattctcatccagaacacgattcgttccaaatggcacgaagttctggag

SEQ ID NO: 42 - protein, 346 aa, synthetic construct
  REGION 1..346: note = Engineered RNA ligase variants
MHHHHHHGGSGMFAKYSSLENHYNNKFIEKIRGAGFDMHTVEWVAREKIHGTNFSVIITPTEIVPAKRTGPILEGESFFGHEIIMKKYKDSFVKVQNMLNAMDLVSVQIFGEFAGGGIQKGVDYGDKDFYVFDILSDSGNEKVYWDDYVVESFATGLGLKLAPLLGRGSFAELSQYPNDFKSIVNYYNELVDTTDLEHANKHVFGPQASSETGVAEGYVLKPVNPKFFNNGTRVAIKCKNSKFSEKAKSDKPIKAKVELTENDKRVLEIFSEYVTWNRVSNVLSHIGSVTAKDFGRVMGLTMKDIINEAAREGHDMLFADNPSAVKKELTILIQNTIRSKWHEVLE

SEQ ID NO: 43 - DNA, 1038 bp, synthetic construct
  misc_feature 1..1038: note = Engineered RNA ligase variants
  source 1..1038: mol_type = other DNA
atgcatcaccatcaccatcacggtggcagcggtatgtttgcgaaatattcaagtctggaaaaccattacaataataagttcattgagaagatccgtggtgcaggcttcgatatgcacaccgtggaatgggtagctcgcgagaagattcatggaacgaactttagcgttatcattactccgaccgaaattgtcccagccaaacgcacagggccgatcttggaaggcgagtcgttctttggtcacgaaattatcatgaagaaatataaagactccttcgtgaagatgcagaacatgctgaatgccatggatcttgttagcgtgcaaatctttggcgaatttgcgggtggtggcattcagaaaggcgtcgattacggagacaaagatttctatgtgtttgacatcctgtctgatagcgggaacgagaaagtttactgggatgactatgtagtcgaatcgtttgcaaccggcctcggtttaaaattagcgcctctgctgggacgtggtagtttcgaggaactgtcccaatacgtgaacgatttcaaaagcatcgtgaactattataatgaattggttgatacgacggacctggaacatgccaataaacacgtctttggtccgcaagcgtcttctgaaactggcgtagcagaaggctacgttcttaaacccgtcaacccgaaattctttaataatggtacacgcgtggcgattaaatgcaagaactccaaattttcggagaaagccaagagcgacaaaccaattaaagcgaaagtggaactgaccgagaacgataaacgtgtgctcgaaatctttagcgagtatgttacctggaatcgcgtcaacaacgtaatttcacatattggctcagtgaccgccaaagattttgggaaagttatgggtctgacgatgcaagacatcattaatgaagcagcacgcgaaggccatgatatgttgttcgctgataacccgtcggcggtgaagaaagagctgaccattctcatccagaacacgattcgttccaaatggcacgaagttctggag

SEQ ID NO: 44 - protein, 346 aa, synthetic construct
  REGION 1..346: note = Engineered RNA ligase variants
MHHHHHHGGSGMFAKYSSLENHYNNKFIEKIRGAGFDMHTVEWVAREKIHGTNFSVIITPTEIVPAKRTGPILEGESFFGHEIIMKKYKDSFVKMQNMLNAMDLVSVQIFGEFAGGGIQKGVDYGDKDFYVFDILSDSGNEKVYWDDYVVESFATGLGLKLAPLLGRGSFEELSQYVNDFKSIVNYYNELVDTTDLEHANKHVFGPQASSETGVAEGYVLKPVNPKFFNNGTRVAIKCKNSKFSEKAKSDKPIKAKVELTENDKRVLEIFSEYVTWNRVNNVISHIGSVTAKDFGKVMGLTMQDIINEAAREGHDMLFADNPSAVKKELTILIQNTIRSKWHEVLE

SEQ ID NO: 45 - DNA, 1038 bp, synthetic construct
  misc_feature 1..1038: note = Engineered RNA ligase variants
  source 1..1038: mol_type = other DNA
atgcatcaccatcaccatcacggtggcagcggtatgtttgcaaaatattcaagtctggaaaaccattacaataataagttcattgagaagatccgtggtgcaggcttcgatatgcacaccgtggaatgggtagctcgcgagaagattcatggaacgaactttagcgttatcattactccgaccgaaatcgtcccagccaaacgcacagggccgatcttggaaggcgagtcgttctttggtcacgaaattatcctgaagaaatataaagactccttcgtgaagatgcagaacatgctgaatgccatggatcttgttagcgtgcaaatctttggcgaatttgcgggtggtggcattcagaaaggcgtcgattacggagacaaagatttctatgtgtttgacatcctgtctgatagcgggaacgagaaagtttactgggatgactatgtagtcgaatcgtttgcaaccggcctcggtctgaaattagcgcctctgctgggacgtggtagtttcgctgaactgtcccagtacccaaacgatttcaaaagcattgtgaactattataatgaattggttgatacgacggacctggaacatgccaataaacacgtctttggtccgcaagcgtcttctgaaactggcgtagcagaaggctacgttcttaaacccgtcaacccgaaattctttaataatggtacacgcgtggcgattaaatgcaagaactccaaattttcggagaaagccaagagcgacaaaccaattaaagcgaaagtggaactgtcggagaacgataaacgtgtgctcgaaatctttagcgagtatgttacctggaatcgcgtcagtaacgtactgtcacacattggcgaggtgaccgcaaaagattttgggcgtgttatgggtctgacgatgaaagacatcattaatgaagcagcacgcgaaggccatgatatgttgttcgctgataacccgtcggcggtgaagaaagagctgaccattctcgtccagaacacgattcgttccaaatggcacgaagtggtggag

SEQ ID NO: 46 - protein, 346 aa, synthetic construct
  REGION 1..346: note = Engineered RNA ligase variants
MHHHHHHGGSGMFAKYSSLENHYNNKFIEKIRGAGFDMHTVEWVAREKIHGTNFSVIITPTEIVPAKRTGPILEGESFFGHEIILKKYKDSFVKMQNMLNAMDLVSVQIFGEFAGGGIQKGVDYGDKDFYVFDILSDSGNEKVYWDDYVVESFATGLGLKLAPLLGRGSFAELSQYPNDFKSIVNYYNELVDTTDLEHANKHVFGPQASSETGVAEGYVLKPVNPKFFNNGTRVAIKCKNSKFSEKAKSDKPIKAKVELSENDKRVLEIFSEYVTWNRVSNVLSHIGEVTAKDFGRVMGLTMKDIINEAAREGHDMLFADNPSAVKKELTILVQNTIRSKWHEVVE

SEQ ID NO: 47 - DNA, 1038 bp, synthetic construct
  misc_feature 1..1038: note = Engineered RNA ligase variants
  source 1..1038: mol_type = other DNA
atgcatcaccatcaccatcacggtggcagcggtatgtttgcaaaatattcaagtctggaaaaccattacaataataagttcattgagaagatccgtggtgcaggcttcgatatgcacaccgtggaatgggtagctcgcgagaagattcatggaacgaactttagcgttatcattactccgaccgaaatcgtcccagccaaacgcacagggccgatcttggaaggcgagtcgttctttggtcacgaaattatcatgaagaaatataaagactccttcgtgaagatgcagaacatgctgaatgccatggatcttgttagcgtgcaaatctttggcgaatttgcgggtggtggcattcagaaaggcgtcgattacggagacaaagatttctatgtgtttgacatcctgtctgatagcgggaacgagaaagtttactgggatgactatgtagtcgaatcgtttgcaaccggcctcggtctgaaattagcgcctctgctgggacgtggtagtttcgctgaactgtcccagtacccaaacgatttcaaaagcattgtgaactattataatgaattggttgatacgacggacctggaacatgccaataaacacgtctttggtccgcaagcgtcttctgaaactggcgtagcagaaggctacgttcttaaacccgtcaacccgaaattctttaataatggtacacgcgtggcgattaaatgcaagaactccaaattttcggagaaagccaagagcgacaaaccaattaaagcgaaagtggaactgacggagaacgataaacgtgtgctcgaaatctttagcgagtatgttacctggaatcgcgtcagtaacgtactgtcacacattggcagtgtgaccccaaaagattttgggcgtgttatgggtctgacgatgaaagacatcattgaggaagcagcacgcgaaggccatgatatgttgttcgctgataacccgtcggcggtgaagaaagagctgaccattctcgtccagaacacgattcgttccaaatggcacgaagttctggag

SEQ ID NO: 48 - protein, 346 aa, synthetic construct
  REGION 1..346: note = Engineered RNA ligase variants
MHHHHHHGGSGMFAKYSSLENHYNNKFIEKIRGAGFDMHTVEWVAREKIHGTNFSVIITPTEIVPAKRTGPILEGESFFGHEIIMKKYKDSFVKMQNMLNAMDLVSVQIFGEFAGGGIQKGVDYGDKDFYVFDILSDSGNEKVYWDDYVVESFATGLGLKLAPLLGRGSFAELSQYPNDFKSIVNYYNELVDTTDLEHANKHVFGPQASSETGVAEGYVLKPVNPKFFNNGTRVAIKCKNSKFSEKAKSDKPIKAKVELTENDKRVLEIFSEYVTWNRVSNVLSHIGSVTPKDFGRVMGLTMKDIIEEAAREGHDMLFADNPSAVKKELTILVQNTIRSKWHEVLE

SEQ ID NO: 49 - DNA, 1038 bp, synthetic construct
  misc_feature 1..1038: note = Engineered RNA ligase variants
  source 1..1038: mol_type = other DNA
atgcatcaccatcaccatcacggtggcagcggtatgtttgcgaaatattcaagtctggaaaaccattacaataataagttcattgagaagatccgtggtgcaggcttcgatatgcacaccgtggaatgggtagctcgcgagaagattcatggaacgaactttagcgttatcattactccgaccgaaattgtcccagccaaacgcacagggccgatcttggaaggcgagtcgttctttggttacgaaattatcatgaagaaatataaagactccttcgtgaagatgcagaacatgctgaatgccatggatcttgttagcgtgcaaatctttggcgaatttgcgggtggtggcattcagaaaggcgtcgattacggagacaaagatttctatgtgtttgacatcctgtctgatagcgggaacgagaaagtttactgggatgactatgtagtcgaatcgtttgcaaccggcctcggtttaaaattagcgcctctgctgggacgtggtagtttcgaggaactgtccaaatacgtgaacgatttcaaaagcgtcgtgaactattataatgaattggttgatacgacggacctggaacatgccaataaacacgtctttggtccgcaagcgtcttctgaaactggcgtagcagaaggctacgttcttaaacccgtcaacccgaaattctttaataatggtacacgcgtggcgattaaatgcaagaactccaaattttcggagaaagctaagagcgacaaaccaattaaagcgaaagtggaactgaccgagaacgataaacgtgtgctcgaaatctttagcgagtatgttacctggaatcgcgtcagcaacgtactgtcacatattggctcagtgaccgccaaagattttgggcgtgttatgggtctgacgatgaaagacatcattaatgaagcagcacgcgaaggccatgatctgttgttcgctgataacccgtcggcggtgaagaaagagctgaccattctcatccagaacacgctgcgttcgaaatggcacgaagttctggag

SEQ ID NO: 50 - protein, 346 aa, synthetic construct
  REGION 1..346: note = Engineered RNA ligase variants
MHHHHHHGGSGMFAKYSSLENHYNNKFIEKIRGAGFDMHTVEWVAREKIHGTNFSVIITPTEIVPAKRTGPILEGESFFGYEIIMKKYKDSFVKMQNMLNAMDLVSVQIFGEFAGGGIQKGVDYGDKDFYVFDILSDSGNEKVYWDDYVVESFATGLGLKLAPLLGRGSFEELSKYVNDFKSVVNYYNELVDTTDLEHANKHVFGPQASSETGVAEGYVLKPVNPKFFNNGTRVAIKCKNSKFSEKAKSDKPIKAKVELTENDKRVLEIFSEYVTWNRVSNVLSHIGSVTAKDFGRVMGLTMKDIINEAAREGHDLLFADNPSAVKKELTILIQNTLRSKWHEVLE

SEQ ID NO: 51 - DNA, 1038 bp, synthetic construct
  misc_feature 1..1038: note = Engineered RNA ligase variants
  source 1..1038: mol_type = other DNA
atgcatcaccatcaccatcacggtggcagcggtatgtttgcgaaatattcaagtctggaaaaccattacaataataagttcattgagaagatccgtggtgcaggcttcgatatgcacaccgtggaatgggtagctcgcgagaagattcatggaacgaactttagcgttatcattactccgaccgaaattgtcccagccaaacgcacagggccgatcttggaaggcgagtcgttctttggttacgaaattatcatgaagaaatataaagactccttcgtgaagatgcagaacatgctgaatgccatggatcttgttagcgtgcaaatctttggcgaatttgcgggtggtggcattcagaaaggcgtcgattacggagacaaagatttctatgtgtttgacatcctgtctgatagcgggaacgagaaagtttactgggatgactatgtagtcgaatcgtttgcaaccggcctcggtttaaaattagcgcctctgctgggacgtggtagtttcgaggaactgtcccaatacgtgaacgatttcaaaagcattgtgaactattataatgaattggttgatacgacggacctggaacatgccaataaacacgtctttggtccgcaagcgtcttctgaaactggcgtagcagaaggctacgttcttaaacccgtcaacccgaaattctttaataatggtacacgcgtggcgattaaatgcaagaactccaaattttcggagaaagctaagagcgacaaaccaattaaagcgaaagtggaactgaccgagaacgataaacgtctgctcgaaatctttagcgagtatgttacctggaatcgcgtcaacaacgtaatttcacatattggctcagtgaccgccaaagattttgggcgtgttatgggtctgacgatgaaagacatcattaatgaagcagcacgcgaaggccatgatatgttgttcgctgataacccgtcggcggtgaagaaagagctgaccattctcatccaggacacgattcgtccgaaatggcacgaagttctggag

SEQ ID NO: 52 - protein, 346 aa, synthetic construct
  REGION 1..346: note = Engineered RNA ligase variants
MHHHHHHGGSGMFAKYSSLENHYNNKFIEKIRGAGFDMHTVEWVAREKIHGTNFSVIITPTEIVPAKRTGPILEGESFFGYEIIMKKYKDSFVKMQNMLNAMDLVSVQIFGEFAGGGIQKGVDYGDKDFYVFDILSDSGNEKVYWDDYVVESFATGLGLKLAPLLGRGSFEELSQYVNDFKSIVNYYNELVDTTDLEHANKHVFGPQASSETGVAEGYVLKPVNPKFFNNGTRVAIKCKNSKFSEKAKSDKPIKAKVELTENDKRLLEIFSEYVTWNRVNNVISHIGSVTAKDFGRVMGLTMKDIINEAAREGHDMLFADNPSAVKKELTILIQDTIRPKWHEVLE

SEQ ID NO: 53 - DNA, 1038 bp, synthetic construct
  misc_feature 1..1038: note = Engineered RNA ligase variants
  source 1..1038: mol_type = other DNA
atgcatcaccatcaccatcacggtggcagcggtatgtttgcaaaatattcaagtctggaaaaccattacaataataagttcattgagaagatccgtggtgcaggcttcgatatgcacaccgtggaatgggtagctcgcgagaagattcatggaacgaactttagcgttatcattactccgaccgaaatcgtcccagccaaacgcacagggccgatcttggaaggcgagtcgttctttggtcacgaaattatcatgaagaaatataaagactccttcgtgaagatgcagaacatgctgaatgccatggatcttgttagcgtgcaaatctttggcgaatttgcgggtggtggcattcagaaaggcgtcgattacggagacaaagatttctatgtgtttgacatcctgtctgatagcgggaacgagaaagtttactgggatgactatgtagtcgaatcgtttgcaaccggcctcggtttaaaattagcgcctctgctgggacgtggtagtttcgctgaactgtcccagtacccaaacgatttcaaaagcattgtgaactattataatgaattggttgatacgacggacctggaacatgccaataaacacgtctttggtccgcaagcgtcttctgaaactggcgtagcagaaggctacgttcttaaacccgtcaacccgaaattctttaataatggtacacgcgtggcgattaaatgcaagaactccaaattttcggagaaagccaagagcgacaaaccaattaaagcgaaagtggaactgaccgagaacgataaacgtgtgctcgaaatctttagcgagtatgttacctggaatcgcgtcagtaacgtactgtcacatattggctcagtgaccgccaaagattttgggcgtgttatgggtctgacgatgaaagacatcattaatgaagcagcacgcgaaggccatgatatgttgttcgctgataacccgtcggcggtgaagaaagagctgaccattctcatccagaacacgattcgttccaaatggcacgaagttctggag

SEQ ID NO: 54 - protein, 346 aa, synthetic construct
  REGION 1..346: note = Engineered RNA ligase variants
MHHHHHHGGSGMFAKYSSLENHYNNKFIEKIRGAGFDMHTVEWVAREKIHGTNFSVIITPTEIVPAKRTGPILEGESFFGHEIIMKKYKDSFVKMQNMLNAMDLVSVQIFGEFAGGGIQKGVDYGDKDFYVFDILSDSGNEKVYWDDYVVESFATGLGLKLAPLLGRGSFAELSQYPNDFKSIVNYYNELVDTTDLEHANKHVFGPQASSETGVAEGYVLKPVNPKFFNNGTRVAIKCKNSKFSEKAKSDKPIKAKVELTENDKRVLEIFSEYVTWNRVSNVLSHIGSVTAKDFGRVMGLTMKDIINEAAREGHDMLFADNPSAVKKELTILIQNTIRSKWHEVLE

SEQ ID NO: 55 - DNA, 1038 bp, synthetic construct
  misc_feature 1..1038: note = Engineered RNA ligase variants
  source 1..1038: mol_type = other DNA
atgcatcaccatcaccatcacggtggcagcggtatgtttgcgaaatattcaagtctggaaaaccattacaataataagttcattgagaagatccgtggtgcaggcttcgatatgcacaccgtggaatgggtagctcgcgagaagattcatggaacgaactttagcgttatcattactccgaccgaaatcgtcccagccaaacgcacagggccgatcttggaaggcgagtcgttctttggtcacgaaattatcatgaagaaatataaagactccttcgtgaaggtgcagaacatgctgaatgccatggatcttgttagcgtgcaaatctttggcgaatttgcgggtggtggcattcagaaaggcgtcgattacggagacaaagatttctatgtgtttgacatcctgtctgatagcgggaacgagaaagtttactgggatgactatgtagtcgaatcgtttgcaaccggcctcggtttcaaattagcgcctctgctgggacgtggtagtttcgctgaactgtcccagtacccaaacgatttcaaaagcattgtgaactattataatgaattggttgatacgacggacctggaacatgccaataaacacgtctttggtccgcaagcgtcttctgaaactggcgtagcagaaggctacgttcttaaacccgtcaacccgaaattctttaataatggtacacgcgtggcgattaaatgcaagaactccaaattttcggagaaagccaagagcgacaaaccaattaaagcgaaagtggaactgtcggagaacgataaacgtgtgctcgaaatctttagcgagtatgttacctggaatcgcgtcaacaacgtactgtcacacattggcgaggtgaccgcaaaagattttgggcgtgttatgggtctgacgatgaaagacatcctgaacgaagcagcacgcgaaggccatgatatgttgttcgctgataacccgtcggcggtgaagaaagagctgaccattctcatccagaacacgattcgttccaaatggcacgaagtggtggag

SEQ ID NO: 56 - protein, 346 aa, synthetic construct
  REGION 1..346: note = Engineered RNA ligase variants
MHHHHHHGGSGMFAKYSSLENHYNNKFIEKIRGAGFDMHTVEWVAREKIHGTNFSVIITPTEIVPAKRTGPILEGESFFGHEIIMKKYKDSFVKVQNMLNAMDLVSVQIFGEFAGGGIQKGVDYGDKDFYVFDILSDSGNEKVYWDDYVVESFATGLGFKLAPLLGRGSFAELSQYPNDFKSIVNYYNELVDTTDLEHANKHVFGPQASSETGVAEGYVLKPVNPKFFNNGTRVAIKCKNSKFSEKAKSDKPIKAKVELSENDKRVLEIFSEYVTWNRVNNVLSHIGEVTAKDFGRVMGLTMKDILNEAAREGHDMLFADNPSAVKKELTILIQNTIRSKWHEVVE

SEQ ID NO: 57 - DNA, 1038 bp, synthetic construct
  misc_feature 1..1038: note = Engineered RNA ligase variants
  source 1..1038: mol_type = other DNA
atgcatcaccatcaccatcacggtggcagcggtatgtttgcgaaatattcaagtctggaaaaccattacaataataagttcattgagaagatccgtggtgcaggcttcgatatgcacaccgtggaatgggtagctcgcgagaagattcatggaacgaactttagcgttatcattactccgaccgaaatcgtcccagccaaacgcacagggccgatcttggaaggcgagtcgttctttggtcacgaaattatcatgaagaaatataaagactccttcgtgaagatgcagaacatgctgaatgccatggatcttgttagcgtgcaaatctttggcgaatttgcgggtggtggcattcagaaaggcgtcgattacggagacaaagatttctatgtgtttgacatcctgtctgatagcgggaacgagaaagtttactgggatgactatgtagtcgaatcgtttgcaaccggcctcggtttaaaattagcgcctctgctgggacgtggtagtttcgaggaactgtccaaatacgtgaacgatttcaaaagcatcgtgaactattataatgaattggttgatacgacggacctggaacatgccaataaacacgtctttggtccgcaagcgtcttctgaaactggcgtagcagaaggctacgttcttaaacccgtcaacccgaaattctttaataatggtacacgcgtggcgattaaatgcaagaactccaaattttcggagaaagccaagagcgacaaaccaattaaagcgaaagtggaactgaccgagaacgataaacgtgtgctcgaaatctttagcgagtatgttacctggaatcgcgtcagtaacgtactgtcacatattggctcagtgaccgccaaagattttgggcgtgttatgggtctgacgatgaaagacatcattaatgaagcagcacgcgaaggccatgatatgttgttcgctgataacccgtcggcggtgaagaaagagctgaccattctcatccaggacacgattcgttcgaaatggcacgaagttctggag

SEQ ID NO: 58 - protein, 346 aa, synthetic construct
  REGION 1..346: note = Engineered RNA ligase variants
MHHHHHHGGSGMFAKYSSLENHYNNKFIEKIRGAGFDMHTVEWVAREKIHGTNFSVIITPTEIVPAKRTGPILEGESFFGHEIIMKKYKDSFVKMQNMLNAMDLVSVQIFGEFAGGGIQKGVDYGDKDFYVFDILSDSGNEKVYWDDYVVESFATGLGLKLAPLLGRGSFEELSKYVNDFKSIVNYYNELVDTTDLEHANKHVFGPQASSETGVAEGYVLKPVNPKFFNNGTRVAIKCKNSKFSEKAKSDKPIKAKVELTENDKRVLEIFSEYVTWNRVSNVLSHIGSVTAKDFGRVMGLTMKDIINEAAREGHDMLFADNPSAVKKELTILIQDTIRSKWHEVLE

SEQ ID NO: 59 - DNA, 1038 bp, synthetic construct
  misc_feature 1..1038: note = Engineered RNA ligase variants
  source 1..1038: mol_type = other DNA
atgcatcaccatcaccatcacggtggcagcggtatgtttgcaaaatattcaagtctggaaaaccattacaataataagttcattgagaagatccgtggtgcaggcttcgatatgcacaccgtggaatgggtagctcgcgagaagattcatggaacgaactttagcgttatcattactccgaccgaaatcgtcccagccaaacgcacagggccgatcttggaaggcgagtcgttctttggtcacgaaattatcatgaagaaatataaagactccttcgtgaagatgcagaacatgctgaatgccatggatcttgttagcgtgcaaatctttggcgaatttgcgggtggtggcattcagaaaggcgtcgattacggagacaaagatttctatgtgtttgacatcctgtctgatagcgggaacgagaaagtttactgggatgactatgtagtcgaatcgtttgcaaccggcctcggtctgaaattagcgcctctgctgggacgtggtagtttcgctgaactgtcccagtacccaaacgatttcaaaagcattgtgaactattataatgaattggttgatacgacggacctggaacatgccaataaacacgtctttggtccgcaagcgtcttctgaaactggcgtagcagaaggctacgttcttaaacccgtcaacccgaaattctttaataatggtacacgcgtggcgattaaatgcaagaactccaaattttcggagaaagccaagagcgacaaaccaattaaagcgaaagtggaactgtcggagaacgataaacgtgtgctcgaaatctttagcgagtatgttacctggaatcgcgtcagtaacgtactgtcacatattggctcagtgaccgccaaagattttgggcgtgttatgggtctgacgatgaaagacatcctgaacgaagcagcacgcgaaggccatgatatgttgttcgctgataacccgtcggcggtgaagaaagagctgaccattctcgtccagaacacgattcgttccaaatggcacgaagttctggag

SEQ ID NO: 60 - protein, 346 aa, synthetic construct
  REGION 1..346: note = Engineered RNA ligase variants
MHHHHHHGGSGMFAKYSSLENHYNNKFIEKIRGAGFDMHTVEWVAREKIHGTNFSVIITPTEIVPAKRTGPILEGESFFGHEIIMKKYKDSFVKMQNMLNAMDLVSVQIFGEFAGGGIQKGVDYGDKDFYVFDILSDSGNEKVYWDDYVVESFATGLGLKLAPLLGRGSFAELSQYPNDFKSIVNYYNELVDTTDLEHANKHVFGPQASSETGVAEGYVLKPVNPKFFNNGTRVAIKCKNSKFSEKAKSDKPIKAKVELSENDKRVLEIFSEYVTWNRVSNVLSHIGSVTAKDFGRVMGLTMKDILNEAAREGHDMLFADNPSAVKKELTILVQNTIRSKWHEVLE

SEQ ID NO: 61 - DNA, 1038 bp, synthetic construct
  misc_feature 1..1038: note = Engineered RNA ligase variants
  source 1..1038: mol_type = other DNA
atgcatcaccatcaccatcacggtggcagcggtatgtttaaaaaatattcaagtctggaaaaccattacaataataagttcattgagaagatccgtggtgcaggcttcgatatgcacaccgtggaatgggtagctcgcgagaagattcatggaacgaactttagcgttatcattactccgaccgaaatcgtcccagccaaacgcacagggccgatcttggaaggcgagtcgttctttggtcacgaaattatcatgaagaaatataaagactccttcgtgaaggtgcagaacatgctgaatgccatggatcttgttagcgtgcaaatctttggcgaatttgcgggtggtggcattcagaaaggcgtcgattacggagacaaagatttctatgtgtttgacatcctgtctgatagcgggaacgagaaagtttactgggatgactatgtagtcgaatcgtttgcaaccggcctcggtctgaaattagcgcctctgctgggacgtggtagtttcgctgaactgtcccagtacccaaacgatttcaaaagcattgtgaactattataatgaattggttgatacgacggacctggaacatgccaataaacacgtctttggtccgcaagcgtcttctgaaactggcgtagcagaaggctacgttcttaaacccgtcaacccgaaattctttaataatggtacacgcgtggcgattaaatgcaagaactccaaattttcggagaaagccaagagcgacaaaccaattaaagcgaaagtggaactgacggagaacgataaacgtgtgctcgaaatctttagcgagtatgttacctggaatcgcgtcagtaacgtactgtcacacattggcgaggtgaccgcaaaagattttgggcgtgttatgggtctgacgatgaaagacatcattgaggaagcagcacgcgaaggccatgatatgttgttcgctgataacccgtcggcggtgaagaaagagctgaccattctcatccagaacacgattcgttccaaatggcacgaagttctggag

SEQ ID NO: 62 - protein, 346 aa, synthetic construct
  REGION 1..346: note = Engineered RNA ligase variants
MHHHHHHGGSGMFKKYSSLENHYNNKFIEKIRGAGFDMHTVEWVAREKIHGTNFSVIITPTEIVPAKRTGPILEGESFFGHEIIMKKYKDSFVKVQNMLNAMDLVSVQIFGEFAGGGIQKGVDYGDKDFYVFDILSDSGNEKVYWDDYVVESFATGLGLKLAPLLGRGSFAELSQYPNDFKSIVNYYNELVDTTDLEHANKHVFGPQASSETGVAEGYVLKPVNPKFFNNGTRVAIKCKNSKFSEKAKSDKPIKAKVELTENDKRVLEIFSEYVTWNRVSNVLSHIGEVTAKDFGRVMGLTMKDIIEEAAREGHDMLFADNPSAVKKELTILIQNTIRSKWHEVLE

SEQ ID NO: 63 - DNA, 1038 bp, synthetic construct
  misc_feature 1..1038: note = Engineered RNA ligase variants
  source 1..1038: mol_type = other DNA
atgcatcaccatcaccatcacggtggcagcggtatgtttgcaaaatattcaagtctggaaaaccattacaataataagttcattgagaagatccgtggtgcaggcttcgatatgcacaccgtggaatgggtagctcgcgagaagattcatggaacgaactttagcgttatcattactccgaccgaaatcgtcccagccaaacgcacagggccgatcttggaaggcgagtcgttctttggtcacgaaattatcatgaagaaatataaagactccttcgtgaaggtgcagaacatgctgaatgccatggatcttgttagcgtgcaaatctttggcgaatttgcgggtggtggcattcagaaaggcgtcgattacggagacaaagatttctatgtgtttgacatcctgtctgatagcgggaacgagaaagtttactgggatgactatgtagtcgaatcgtttgcaaccggcctcggtctgaaattagcgcctctgctgggacgtggtagtttcgctgaactgtcccagtacccaaacgatttcaaaagcattgtgaactattataatgaattggttgatacgacggacctggaacatgccaataaacacgtctttggtccgcaagcgtcttctgaaactggcgtagcagaaggctacgttcttaaacccgtcaacccgaaattctttaataatggtacacgcgtggcgattaaatgcaagaactccaaattttcggagaaagccaagagcgacaaaccgattaaagcgaaagtggaactgaccgagaacgataaacgtgtgctcgaaatctttagcgagtatgttacctggaatcgcgtcagtaacgtactgtcacatattggctcagtgaccgccaaagattttgggcgtgttatgggtctgacgatgaaagacatcattaatgaagcagcacgcgaaggccatgatatgttgttcgctgataacccgtcggcggtgaagaaagagctgaccattctcatccagaacacgattcgttccaaatggcacgaagtggtggag

SEQ ID NO: 64 - protein, 346 aa, synthetic construct
  REGION 1..346: note = Engineered RNA ligase variants
MHHHHHHGGSGMFAKYSSLENHYNNKFIEKIRGAGFDMHTVEWVAREKIHGTNFSVIITPTEIVPAKRTGPILEGESFFGHEIIMKKYKDSFVKVQNMLNAMDLVSVQIFGEFAGGGIQKGVDYGDKDFYVFDILSDSGNEKVYWDDYVVESFATGLGLKLAPLLGRGSFAELSQYPNDFKSIVNYYNELVDTTDLEHANKHVFGPQASSETGVAEGYVLKPVNPKFFNNGTRVAIKCKNSKFSEKAKSDKPIKAKVELTENDKRVLEIFSEYVTWNRVSNVLSHIGSVTAKDFGRVMGLTMKDIINEAAREGHDMLFADNPSAVKKELTILIQNTIRSKWHEVVE

SEQ ID NO: 65 - DNA, 1038 bp, synthetic construct
  misc_feature 1..1038: note = Engineered RNA ligase variants
  source 1..1038: mol_type = other DNA
atgcatcaccatcaccatcacggtggcagcggtatgtttgcgaaatattcaagtctggaaaaccattacaataataagttcattgagaagatccgtggtgcaggcttcgatatgcacaccgtggaatgggtagctcgcgagaagattcatggaacgaactttagcgttatcattactccgaccgaaatcgtcccagccaaacgcacagggccgatcttggaaggcgagtcgttctttggtcacgaaattatcatgaagaaatataaagactccttcgtgaaggtgcagaacatgctgaatgccatggatcttgttagcgtgcaaatctttggcgaatttgcgggtggtggcattcagaaaggcgtcgattacggagacaaagatttctatgtgtttgacatcctgtctgatagcgggaacgagaaagtttactgggatgactatgtagtcgaatcgtttgcaaccggcctcggtttcaaattagcgcctctgctgggacgtggtagtttcgctgaactgtcccagtacccaaacgatttcaaaagcattgtgaactattataatgaattggttgatacgacggacctggaacatgccaataaacacgtctttggtccgcaagcgtcttctgaaactggcgtagcagaaggctacgttcttaaacccgtcaacccgaaattctttaataatggtacacgcgtggcgattaaatgcaagaactccaaattttcggagaaagccaagagcgacaaaccaattaaagcgaaagtggaactgtcggagaacgataaacgtgtgctcgaaatctttagcgagtatgttacctggaatcgcgtcagtaacgtactgtcaaaaattggcgaggtgaccgcaaaagattttgggcgtgttatgggtctgacgatgaaagacatcattaatgaagcagcacgcgaaggccatgatatgttgttcgctgataacccgtcggcggtgaagaaagagctgaccattctcatccagaacacgattcgttccaaatggcacgaagttctggag

SEQ ID NO: 66 - protein, 346 aa, synthetic construct
  REGION 1..346: note = Engineered RNA ligase variants
MHHHHHHGGSGMFAKYSSLENHYNNKFIEKIRGAGFDMHTVEWVAREKIHGTNFSVIITPTEIVPAKRTGPILEGESFFGHEIIMKKYKDSFVKVQNMLNAMDLVSVQIFGEFAGGGIQKGVDYGDKDFYVFDILSDSGNEKVYWDDYVVESFATGLGFKLAPLLGRGSFAELSQYPNDFKSIVNYYNELVDTTDLEHANKHVFGPQASSETGVAEGYVLKPVNPKFFNNGTRVAIKCKNSKFSEKAKSDKPIKAKVELSENDKRVLEIFSEYVTWNRVSNVLSKIGEVTAKDFGRVMGLTMKDIINEAAREGHDMLFADNPSAVKKELTILIQNTIRSKWHEVLE

SEQ ID NO: 67 - DNA, 1038 bp, synthetic construct
  misc_feature 1..1038: note = Engineered RNA ligase variants
  source 1..1038: mol_type = other DNA
atgcatcaccatcaccatcacggtggcagcggtatgtttgcgaaatattcaagtctggaaaaccattacaataataagttcattgagaagatccgtggtgcaggcttcgatatgcacaccgtggaatgggtagctcgcgagaagattcatggaacgaactttagcgttatcattactccgaccgaaatcgtcccagccaaacgcacagggccgatcttggaaggcgagtcgttctttggtcacgaaattatcatgaagaaatataaagactccttcgtgaagatgcagaacatgctgaatgccatggatcttgttagcgtgcaaatctttggcgaatttgcgggtggtggcattcagaaaggcgtcgattacggagacaaagatttctatgtgtttgacatcctgtctgatagcgggaacgagaaagtttactgggatgactatgtagtcgaatcgtttgcaaccggcctcggtttaaaattagcgcctctgctgggacgtggtagtttcgctgaactgtcccagtacgtgaacgatttcaaaagcattgtgaactattataatgaattggttgatacgacggacctggaacatgccaataaacacgtctttggtccgcaagcgtcttctgaaactggcgtagcagaaggctacgttcttaaacccgtcaacccgaaattctttaataatggtacacgcgtggcgattaaatgcaagaactccaaattttcggagaaagccaagagcgacaaaccaattaaagcgaaagtggaactgaccgagaacgataaacgtctgctcgaaatctttagcgagtatgttacctggaatcgcgtcagtaacgtactgtcacatattggctcagtgaccgccaaagattttgggaaagttatgggtctgacgatgaaagacatcattaatgaagcagcacgcgaaggccatgatatgttgttcgctgataacccgtcggcggtgaagaaagagctgaccattctcatccagaacacgattcgttccaaatggcacgaagttctggag

SEQ ID NO: 68 - protein, 346 aa, synthetic construct
  REGION 1..346: note = Engineered RNA ligase variants
MHHHHHHGGSGMFAKYSSLENHYNNKFIEKIRGAGFDMHTVEWVAREKIHGTNFSVIITPTEIVPAKRTGPILEGESFFGHEIIMKKYKDSFVKMQNMLNAMDLVSVQIFGEFAGGGIQKGVDYGDKDFYVFDILSDSGNEKVYWDDYVVESFATGLGLKLAPLLGRGSFAELSQYVNDFKSIVNYYNELVDTTDLEHANKHVFGPQASSETGVAEGYVLKPVNPKFFNNGTRVAIKCKNSKFSEKAKSDKPIKAKVELTENDKRLLEIFSEYVTWNRVSNVLSHIGSVTAKDFGKVMGLTMKDIINEAAREGHDMLFADNPSAVKKELTILIQNTIRSKWHEVLE

SEQ ID NO: 69 - DNA, 1038 bp, synthetic construct
  misc_feature 1..1038: note = Engineered RNA ligase variants
  source 1..1038: mol_type = other DNA
atgcatcaccatcaccatcacggtggcagcggtatgtttgcgaaatattcaagtctggaaaaccattacaataataagttcattgagaagatccgtggtgcaggcttcgatatgcacaccgtggaatgggtagctcgcgagaagattcatggaacgaactttagcgttatcattactccgaccgaaattgtcccagccaaacgcacagggccgatcttggaaggcgagtcgttctttggttacgaaattatcatgaagaaatataaagactccttcgtgaagatgcagaacatgctgaatgccatggatcttgttagcgtgcaaatctttggcgaatttgcgggtggtggcattcagaaaggcgtcgattacggagacaaagatttctatgtgtttgacatcctgtctgatagcgggaacgagaaagtttactgggatgactatgtagtcgaatcgtttgcaaccggcctcggtttaaaattagcgcctctgctgggacgtggtagtttcgcggaactgtcccaatacgtgaacgatttcaaaagcattgtgaactattataatgaattggttgatacgacggacctggaacatgccaataaacacgtctttggtccgcaagcgtcttctgaaactggcgtagcagaaggctacgttcttaaacccgtcaacccgaaattctttaataatggtacacgcgtggcgattaaatgcaagaactccaaattttcggagaaagctaagagcgacaaaccaattaaagcgaaagtggaactgaccgagaacgataaacgtgtgctcgaaatctttagcgagtatgttacctggaatcgcgtcagcaacgtaatttcacatattggctcagtgaccgccaaagattttgggcgtgttatgggtctgacgatgaaagacatcattaatgaagcagcacgcgaaggccatgatatgttgttcgctgataacccgtcggcggtgaagaaagagctgaccattctcatccaggacacgctgcgttcgaaatggcacgaagttctggag

SEQ ID NO: 70 - protein, 346 aa, synthetic construct
  REGION 1..346: note = Engineered RNA ligase variants
MHHHHHHGGSGMFAKYSSLENHYNNKFIEKIRGAGFDMHTVEWVAREKIHGTNFSVIITPTEIVPAKRTGPILEGESFFGYEIIMKKYKDSFVKMQNMLNAMDLVSVQIFGEFAGGGIQKGVDYGDKDFYVFDILSDSGNEKVYWDDYVVESFATGLGLKLAPLLGRGSFAELSQYVNDFKSIVNYYNELVDTTDLEHANKHVFGPQASSETGVAEGYVLKPVNPKFFNNGTRVAIKCKNSKFSEKAKSDKPIKAKVELTENDKRVLEIFSEYVTWNRVSNVISHIGSVTAKDFGRVMGLTMKDIINEAAREGHDMLFADNPSAVKKELTILIQDTLRSKWHEVLE

SEQ ID NO: 71 - DNA, 1038 bp, synthetic construct
  misc_feature 1..1038: note = Engineered RNA ligase variants
  source 1..1038: mol_type = other DNA
atgcatcaccatcaccatcacggtggcagcggtatgtttgcaaaatattcaagtctggaaaaccattacaataataagttcattgagaagatccgtggtgcaggcttcgatatgcacaccgtggaatgggtagctcgcgagaagattcatggaacgaactttagcgttatcattactccgaccgaaatcgtcccagccaaacgcacagggccgatcttggaaggcgagtcgttctttggtcacgaaattatcatgaagaaatataaagactccttcgtgaaggtgcagaacatgctgaatgccatggatcttgttagcgtgcaaatctttggcgaatttgcgggtggtggcattcagaaaggcgtcgattacggagacaaagatttctatgtgtttgacatcctgtctgatagcgggaacgagaaagtttactgggatgactatgtagtcgaatcgtttgcaaccggcctcggtttcaaattagcgcctctgctgggacgtggtagtttcgctgaactgtcccagtacccaaacgatttcaaaagcattgtgaactattataatgaattggttgatacgacggacctggaacatgccaataaacacgtctttggtccgcaagcgtcttctgaaactggcgtagcagaaggctacgttcttaaacccgtcaacccgaaattctttaataatggtacacgcgtggcgattaaatgcaagaactccaaattttcggagaaagccaagagcgacaaaccaattaaagcgaaagtggaactgtcggagaacgataaacgtgtgctcgaaatctttagcgagtatgttacctggaatcgcgtcagtaacgtactgtcacatattggctcagtgaccgccaaagattttgggcgtgttatgggtctgacgatgaaagacatcattaacgaagcagcacgcgaaggccatgatatgttgttcgctgataacccgtcggcggtgaagaaagagctgaccattctcatccagaacacgattcgttccaaatggatcgaagtggtggag

SEQ ID NO: 72 - protein, 346 aa, synthetic construct
  REGION 1..346: note = Engineered RNA ligase variants
MHHHHHHGGSGMFAKYSSLENHYNNKFIEKIRGAGFDMHTVEWVAREKIHGTNFSVIITPTEIVPAKRTGPILEGESFFGHEIIMKKYKDSFVKVQNMLNAMDLVSVQIFGEFAGGGIQKGVDYGDKDFYVFDILSDSGNEKVYWDDYVVESFATGLGFKLAPLLGRGSFAELSQYPNDFKSIVNYYNELVDTTDLEHANKHVFGPQASSETGVAEGYVLKPVNPKFFNNGTRVAIKCKNSKFSEKAKSDKPIKAKVELSENDKRVLEIFSEYVTWNRVSNVLSHIGSVTAKDFGRVMGLTMKDIINEAAREGHDMLFADNPSAVKKELTILIQNTIRSKWIEVVE

SEQ ID NO: 73 - DNA, 1038 bp, synthetic construct
  misc_feature 1..1038: note = Engineered RNA ligase variants
  source 1..1038: mol_type = other DNA
atgcatcaccatcaccatcacggtggcagcggtatgtttgcgaaatattcaagtctggaaaaccattacaataataagttcattgagaagatccgtggtgcaggcttcgatatgcacaccgtggaatgggtagctcgcgagaagattcatggaacgaactttagcgttatcattactccgaccgaagttgtcccagccaaacgcacagggccgatcttggaaggcgagtcgttctttggtcacgaaattatcatgaagaaatataaagactccttcgtgaagatgcagaacatgctgaatgccatggatcttgttagcgtgcaaatctttggcgaatttgcgggtggtggcattcagaaaggcgtcgattacggagacaaagatttctatgtgtttgacatcctgtctgatagcgggaacgagaaagtttactgggatgactatgtagtcgaatcgtttgcaaccggcctcggtttaaaattagcgcctctgctgggacgtggtagtttcgaggaactgtccaaatacgtgaacgatttcaaaagcgtcgtgaactattataatgaattggttgatacgacggacctggaacatgccaataaacacgtctttggtccgcaagcgtcttctgaaactggcgtagcagaaggctacgttcttaaacccgtcaacccgaaattctttaataatggtacacgcgtggcgattaaatgcaagaactccaaattttcggagaaagctaagagcgacaaaccaattaaagcgaaagtggaactgaccgagaacgataaacgtctgctcgaaatctttagcgagtatgttacctggaatcgcgtcaacaacgtactgtcacatattggctcagtgaccgccaaagattttgggaaagttatgggtctgacgatgaaagacatcattaatgaagcagcacgcgaaggccatgatctgttgttcgctgataacccgtcggcggtgaagaaagagctgaccattctcatccagaacacgattcgttccaaatggcacgaagttctggag

SEQ ID NO: 74 - protein, 346 aa, synthetic construct
  REGION 1..346: note = Engineered RNA ligase variants
MHHHHHHGGSGMFAKYSSLENHYNNKFIEKIRGAGFDMHTVEWVAREKIHGTNFSVIITPTEVVPAKRTGPILEGESFFGHEIIMKKYKDSFVKMQNMLNAMDLVSVQIFGEFAGGGIQKGVDYGDKDFYVFDILSDSGNEKVYWDDYVVESFATGLGLKLAPLLGRGSFEELSKYVNDFKSVVNYYNELVDTTDLEHANKHVFGPQASSETGVAEGYVLKPVNPKFFNNGTRVAIKCKNSKFSEKAKSDKPIKAKVELTENDKRLLEIFSEYVTWNRVNNVLSHIGSVTAKDFGKVMGLTMKDIINEAAREGHDLLFADNPSAVKKELTILIQNTIRSKWHEVLE

SEQ ID NO: 75 - DNA, 1038 bp, synthetic construct
  misc_feature 1..1038: note = Engineered RNA ligase variants
  source 1..1038: mol_type = other DNA
atgcatcaccatcaccatcacggtggcagcggtatgtttgcgaaatattcaagtctggaaaaccattacaataataagttcattgagaagatccgtggtgcaggcttcgatatgcacaccgtggaatgggtagctcgcgagaagattcatggaacgaactttagcgttatcattactccgaccgaaattgtcccagccaaacgcacagggccgatcttggaaggcgagtcgttctttggtcacgaaattatcatgaagaaatataaagactccttcgtgaagatgcagaacatgctgaatgccatggatcttgttagcgtgcaaatctttggcgaatttgcgggtggtggcattcagaaaggcgtcgattacggagacaaagatttctatgtgtttgacatcctgtctgatagcgggaacgagaaagtttactgggatgactatgtagtcgaatcgtttgcaaccggcctcggtttaaaattagcgcctctgctgggacgtggtagtttcgcggaactgtcccaatacgtgaacgatttcaaaagcattgtgaactattataatgaattggttgatacgacggacctggaacatgccaataaacacgtctttggtccgcaagcgtcttctgaaactggcgtagcagaaggctacgttcttaaacccgtcaacccgaaattctttaataatggtacacgcgtggcgattaaatgcaagaactccaaattttcggagaaagccaagagcgacaaaccaattaaagcgaaagtggaactgaccgagaacgataaacgtgtgctcgaaatctttagcgagtatgttacctggaatcgcgtcaacaacgtactgtcacatattggctcagtgaccgccaaagattttgggcgtgttatgggtctgacgatgaaagacatcattaatgaagcagcacgcgaaggccatgatatgttgttcgctgataacccgtcggcggtgaagaaagagctgaccattctcatccaggacacgctgcgttcgaaatggcacgaagttctggag

SEQ ID NO: 76 - protein, 346 aa, synthetic construct
  REGION 1..346: note = Engineered RNA ligase variants
MHHHHHHGGSGMFAKYSSLENHYNNKFIEKIRGAGFDMHTVEWVAREKIHGTNFSVIITPTEIVPAKRTGPILEGESFFGHEIIMKKYKDSFVKMQNMLNAMDLVSVQIFGEFAGGGIQKGVDYGDKDFYVFDILSDSGNEKVYWDDYVVESFATGLGLKLAPLLGRGSFAELSQYVNDFKSIVNYYNELVDTTDLEHANKHVFGPQASSETGVAEGYVLKPVNPKFFNNGTRVAIKCKNSKFSEKAKSDKPIKAKVELTENDKRVLEIFSEYVTWNRVNNVLSHIGSVTAKDFGRVMGLTMKDIINEAAREGHDMLFADNPSAVKKELTILIQDTLRSKWHEVLE

SEQ ID NO: 77 - DNA, 1038 bp, synthetic construct
  misc_feature 1..1038: note = Engineered RNA ligase variants
  source 1..1038: mol_type = other DNA
atgcatcaccatcaccatcacggtggcagcggtatgtttgcgaaatattcaagtctggaaaaccattacaataataagttcattgagaagatccgtggtgcaggcttcgatatgcacaccgtggaatgggtagctcgcgagaagattcatggaacgaactttagcgttatcattactccgaccgaaattgtcccagccaaacgcacagggccgatcttggaaggcgagtcgttctttggttacgaaattatcatgaagaaatataaagactccttcgtgaagatgcagaacatgctgaatgccatggatcttgttagcgtgcaaatctttggcgaatttgcgggtggtggcattcagaaaggcgtcgattacggagacaaagatttctatgtgtttgacatcctgtctgatagcgggaacgagaaagtttactgggatgactatgtagtcgaatcgtttgcaaccggcctcggtttaaaattagcgcctctgctgggacgtggtagtttcgaggaactgtcccaatacgtgaacgatttcaaaagcattgtgaactattataatgaattggttgatacgacggacctggaacatgccaataaacacgtctttggtccgcaagcgtcttctgaaactggcgtagcagaaggctacgttcttaaacccgtcaacccgaaattctttaataatggtacacgcgtggcgattaaatgcaagaactccaaattttcggagaaagccaagagcgacaaaccaattaaagcgaaagtggaactgaccgagaacgataaacgtgtgctcgaaatctttagcgagtatgttacctggaatcgcgtcaacaacgtactgtcacatattggctcagtgaccgccaaagattttgggcgtgttatgggtctgacgatgaaagacatcattaatgaagcagcacgcgaaggccatgatatgttgttcgctgataacccgtcggcggtgaagaaagagctgaccattctcatccagaacacgattcgttccaaatggcacgaagttctggag

SEQ ID NO: 78 - protein, 346 aa, synthetic construct
  REGION 1..346: note = Engineered RNA ligase variants
MHHHHHHGGSGMFAKYSSLENHYNNKFIEKIRGAGFDMHTVEWVAREKIHGTNFSVIITPTEIVPAKRTGPILEGESFFGYEIIMKKYKDSFVKMQNMLNAMDLVSVQIFGEFAGGGIQKGVDYGDKDFYVFDILSDSGNEKVYWDDYVVESFATGLGLKLAPLLGRGSFEELSQYVNDFKSIVNYYNELVDTTDLEHANKHVFGPQASSETGVAEGYVLKPVNPKFFNNGTRVAIKCKNSKFSEKAKSDKPIKAKVELTENDKRVLEIFSEYVTWNRVNNVLSHIGSVTAKDFGRVMGLTMKDIINEAAREGHDMLFADNPSAVKKELTILIQNTIRSKWHEVLE

SEQ ID NO: 79 - DNA, 1038 bp, synthetic construct
  misc_feature 1..1038: note = Engineered RNA ligase variants
  source 1..1038: mol_type = other DNA
atgcatcaccatcaccatcacggtggcagcggtatgtttgcgaaatattcaagtctggaaaaccattacaataataagttcattgagaagatccgtggtgcaggcttcgatatgcacaccgtggaatgggtagctcgcgagaagattcatggaacgaactttagcgttatcattactccgaccgaaattgtcccagccaaacgcacagggccgatcttggaaggcgagtcgttctttggttacgaaattatcatgaagaaatataaagactccttcgtgaagatgcagaacatgctgaatgccatggatcttgttagcgtgcaaatctttggcgaatttgcgggtggtggcattcagaaaggcgtcgattacggagacaaagatttctatgtgtttgacatcctgtctgatagcgggaacgagaaagtttactgggatgactatgtagtcgaatcgtttgcaaccggcctcggtttaaaattagcgcctctgctgggacgtggtagtttcgaggaactgtccaaatacgtgaacgatttcaaaagcatcgtgaactattataatgaattggttgatacgacggacctggaacatgccaataaacacgtctttggtccgcaagcgtcttctgaaactggcgtagcagaaggctacgttcttaaacccgtcaacccgaaattctttaataatggtacacgcgtggcgattaaatgcaagaactccaaattttcggagaaagctaagagcgacaaaccaattaaagcgaaagtggaactgaccgagaacgataaacgtgtgctcgaaatctttagcgagtatgttacctggaatcgcgtcagcaacgtactgtcacatattggctcagtgaccgccaaagattttgggaaagttatgggtctgacgatgaaagacatcattaatgaagcagcacgcgaaggccatgatctgttgttcgctgataacccgtcggcggtgaagaaagagctgaccattctcatccagaacacgattcgttcgaaatggcacgaagttctggag

SEQ ID NO: 80 - protein, 346 aa, synthetic construct
  REGION 1..346: note = Engineered RNA ligase variants
MHHHHHHGGSGMFAKYSSLENHYNNKFIEKIRGAGFDMHTVEWVAREKIHGTNFSVIITPTEIVPAKRTGPILEGESFFGYEIIMKKYKDSFVKMQNMLNAMDLVSVQIFGEFAGGGIQKGVDYGDKDFYVFDILSDSGNEKVYWDDYVVESFATGLGLKLAPLLGRGSFEELSKYVNDFKSIVNYYNELVDTTDLEHANKHVFGPQASSETGVAEGYVLKPVNPKFFNNGTRVAIKCKNSKFSEKAKSDKPIKAKVELTENDKRVLEIFSEYVTWNRVSNVLSHIGSVTAKDFGKVMGLTMKDIINEAAREGHDLLFADNPSAVKKELTILIQNTIRSKWHEVLE

SEQ ID NO: 81 - DNA, 1038 bp, synthetic construct
  misc_feature 1..1038: note = Engineered RNA ligase variants
  source 1..1038: mol_type = other DNA
atgcatcaccatcaccatcacggtggcagcggtatgtttgcgaaatattcaagtctggaaaaccattacaataataagttcattgagaagatccgtggtgcaggcttcgatatgcacaccgtggaatgggtagctcgcgagaagattcatggaacgaactttagcgttatcattactccgaccgaaattgtcccagccaaacgcacagggccgatcttggaaggcgagtcgttctttggtcacgaaattatcatgaagaaatataaagactccttcgtgaagatgcagaacatgctgaatgccatggatcttgttagcgtgcaaatctttggcgaatttgcgggtggtggcattcagaaaggcgtcgattacggagacaaagatttctatgtgtttgacatcctgtctgatagcgggaacgagaaagtttactgggatgactatgtagtcgaatcgtttgcaaccggcctcggtttaaaattagcgcctctgctgggacgtggtagtttcgaggaactgtccaaatacgtgaacgatttcaaaagcatcgtgaactattataatgaattggttgatacgacggacctggaacatgccaataaacacgtctttggtccgcaagcgtcttctgaaactggcgtagcagaaggctacgttcttaaacccgtcaacccgaaattctttaataatggtacacgcgtggcgattaaatgcaagaactccaaattttcggagaaagctaagagcgacaaaccaattaaagcgaaagtggaactgaccgagaacgataaacgtgtgctcgaaatctttagcgagtatgttacctggaatcgcgtcagcaacgtactgtcacatattggctcagtgaccgccaaagattttgggcgtgttatgggtctgacgatgaaagacatcattaatgaagcagcacgcgaaggccatgatctgttgttcgctgataacccgtcggcggtgaagaaagagctgaccattctcatccaggacacgattcgttcgaaatggcacgaagttctggag

SEQ ID NO: 82 - protein, 346 aa, synthetic construct
  REGION 1..346: note = Engineered RNA ligase variants
MHHHHHHGGSGMFAKYSSLENHYNNKFIEKIRGAGFDMHTVEWVAREKIHGTNFSVIITPTEIVPAKRTGPILEGESFFGHEIIMKKYKDSFVKMQNMLNAMDLVSVQIFGEFAGGGIQKGVDYGDKDFYVFDILSDSGNEKVYWDDYVVESFATGLGLKLAPLLGRGSFEELSKYVNDFKSIVNYYNELVDTTDLEHANKHVFGPQASSETGVAEGYVLKPVNPKFFNNGTRVAIKCKNSKFSEKAKSDKPIKAKVELTENDKRVLEIFSEYVTWNRVSNVLSHIGSVTAKDFGRVMGLTMKDIINEAAREGHDLLFADNPSAVKKELTILIQDTIRSKWHEVLE

SEQ ID NO: 83 - DNA, 1038 bp, synthetic construct
  misc_feature 1..1038: note = Engineered RNA ligase variants
  source 1..1038: mol_type = other DNA
atgcatcaccatcaccatcacggtggcagcggtatgtttgcgaaatattcaagtctggaaaaccattacaataataagttcattgagaagatccgtggtgcaggcttcgatatgcacaccgtggaatgggtagctcgcgagaagattcatggaacgaactttagcgttatcattactccgaccgaaatcgtcccagccaaacgcacagggccgatcttggaaggcgagtcgttctttggtcacgaaattatcatgaagaaatataaagactccttcgtgaagatgcagaacatgctgaatgccatggatcttgttagcgtgcaaatctttggcgaatttgcgggtggtggcattcagaaaggcgtcgattacggagacaaagatttctatgtgtttgacatcctgtctgatagcgggaacgagaaagtttactgggatgactatgtagtcgaatcgtttgcaaccggcctcggtttaaaattagcgcctctgctgggacgtggtagtttcgaggaactgtcccaatacgtgaacgatttcaaaagcattgtgaactattataatgaattggttgatacgacggacctggaacatgccaataaacacgtctttggtccgcaagcgtcttctgaaactggcgtagcagaaggctacgttcttaaacccgtcaacccgaaattctttaataatggtacacgcgtggcgattaaatgcaagaactccaaattttcggagaaagctaagagcgacaaaccaattaaagcgaaagtggaactgaccgagaacgataaacgtgtgctcgaaatctttagcgagtatgttacctggaatcgcgtcaacaacgtaatttcacatattggctcagtgaccgccaaagattttgggaaagttatgggtctgacgatgaaagacatcattaatgaagcagcacgcgaaggccatgatctgttgttcgctgataacccgtcggcggtgaagaaagagctgaccattctcatccagaacacgattcgttccaaatggcacgaagttctggag

SEQ ID NO: 84 - protein, 346 aa, synthetic construct
  REGION 1..346: note = Engineered RNA ligase variants
MHHHHHHGGSGMFAKYSSLENHYNNKFIEKIRGAGFDMHTVEWVAREKIHGTNFSVIITPTEIVPAKRTGPILEGESFFGHEIIMKKYKDSFVKMQNMLNAMDLVSVQIFGEFAGGGIQKGVDYGDKDFYVFDILSDSGNEKVYWDDYVVESFATGLGLKLAPLLGRGSFEELSQYVNDFKSIVNYYNELVDTTDLEHANKHVFGPQASSETGVAEGYVLKPVNPKFFNNGTRVAIKCKNSKFSEKAKSDKPIKAKVELTENDKRVLEIFSEYVTWNRVNNVISHIGSVTAKDFGKVMGLTMKDIINEAAREGHDLLFADNPSAVKKELTILIQNTIRSKWHEVLE

SEQ ID NO: 85 - DNA, 1038 bp, synthetic construct
  misc_feature 1..1038: note = Engineered RNA ligase variants
  source 1..1038: mol_type = other DNA
atgcatcaccatcaccatcacggtggcagcggtatgtttgcgaaatattcaagtctggaaaaccattacaataataagttcattgagaagatccgtggtgcaggcttcgatatgcacaccgtggaatgggtagctcgcgagaagattcatggaacgaactttagcgttatcattactccgaccgaaatcgtcccagccaaacgcacagggccgatcttggaaggcgagtcgttctttggtcacgaaattatcatgaagaaatataaagactccttcgtgaagatgcagaacatgctgaatgccatggatcttgttagcgtgcaaatctttggcgaatttgcgggtggtggcattcagaaaggcgtcgattacggagacaaagatttctatgtgtttgacatcctgtctgatagcgggaacgagaaagtttactgggatgactatgtagtcgaatcgtttgcaaccggcctcggtttaaaattagcgcctctgctgggacgtggtagtttcgaggaactgtcccaatacgtgaacgatttcaaaagcattgtgaactattataatgaattggttgatacgacggacctggaacatgccaataaacacgtctttggtccgcaagcgtcttctgaaactggcgtagcagaaggctacgttcttaaacccgtcaacccgaaattctttaataatggtacacgcgtggcgattaaatgcaagaactccaaattttcggagaaagccaagagcgacaaaccaattaaagcgaaagtggaactgaccgagaacgataaacgtgtgctcgaaatctttagcgagtatgttacctggaatcgcgtcagcaacgtaatttcacatattggctcagtgaccgccaaagattttgggcgtgttatgggtctgacgatgaaagacatcattaatgaagcagcacgcgaaggccatgatatgttgttcgctgataacccgtcggcggtgaagaaagagctgaccattctcatccaggacacgattcgttcgaaatggcacgaagttctggag

SEQ ID NO: 86 - protein, 346 aa, synthetic construct
  REGION 1..346: note = Engineered RNA ligase variants
MHHHHHHGGSGMFAKYSSLENHYNNKFIEKIRGAGFDMHTVEWVAREKIHGTNFSVIITPTEIVPAKRTGPILEGESFFGHEIIMKKYKDSFVKMQNMLNAMDLVSVQIFGEFAGGGIQKGVDYGDKDFYVFDILSDSGNEKVYWDDYVVESFATGLGLKLAPLLGRGSFEELSQYVNDFKSIVNYYNELVDTTDLEHANKHVFGPQASSETGVAEGYVLKPVNPKFFNNGTRVAIKCKNSKFSEKAKSDKPIKAKVELTENDKRVLEIFSEYVTWNRVSNVISHIGSVTAKDFGRVMGLTMKDIINEAAREGHDMLFADNPSAVKKELTILIQDTIRSKWHEVLE

SEQ ID NO: 87 - DNA, 1038 bp, synthetic construct
  misc_feature 1..1038: note = Engineered RNA ligase variants
  source 1..1038: mol_type = other DNA
atgcatcaccatcaccatcacggtggcagcggtatgtttgcgaaatattcaagtctggaaaaccattacaataataagttcattgagaagatccgtggtgcaggcttcgatatgcacaccgtggaatgggtagctcgcgagaagattcatggaacgaactttagcgttatcattactccgaccgaagttgtcccagccaaacgcacagggccgatcttggaaggcgagtcgttctttggtcacgaaattatcatgaagaaatataaagactcctttgtgaagatgcagaacatgctgaatgccatggatcttgttagcgtgcaaatctttggcgaatttgcgggtggtggcattcagaaaggcgtcgattacggagacaaagatttctatgtgtttgacatcctgtctgatagcgggaacgagaaagtttactgggatgactatgtagtcgaatcgtttgcaaccggcctcggtttaaaattagcgcctctgctgggacgtggtagtttcgaggaactgtccaaatacgtgaacgatttcaaaagcgtcgtgaactattataatgaattggttgatacgacggacctggaacatgccaataaacacgtctttggtccgcaagcgtcttctgaaactggcgtagcagaaggctacgttcttaaacccgtcaacccgaaattctttaataatggtacacgcgtggcgattaaatgcaagaactccaaattttcggagaaagctaagagcgacaaaccaattaaagcgaaagtggaactgaccgagaacgataaacgtctgctcgaaatctttagcgagtatgttacctggaatcgcgtcagcaacgtaatttcacatattggctcagtgaccgccaaagattttgggcgtgttatgggtctgacgatgcaagacatcattaatgaagcagcacgcgaaggccatgatctgttgttcgctgataacccgtcggcggtgaagaaagagctgaccattctcatccagaacacgattcgttccaaatggcacgaagttctggag

SEQ ID NO: 88 - protein, 346 aa, synthetic construct
  REGION 1..346: note = Engineered RNA ligase variants
MHHHHHHGGSGMFAKYSSLENHYNNKFIEKIRGAGFDMHTVEWVAREKIHGTNFSVIITPTEVVPAKRTGPILEGESFFGHEIIMKKYKDSFVKMQNMLNAMDLVSVQIFGEFAGGGIQKGVDYGDKDFYVFDILSDSGNEKVYWDDYVVESFATGLGLKLAPLLGRGSFEELSKYVNDFKSVVNYYNELVDTTDLEHANKHVFGPQASSETGVAEGYVLKPVNPKFFNNGTRVAIKCKNSKFSEKAKSDKPIKAKVELTENDKRLLEIFSEYVTWNRVSNVISHIGSVTAKDFGRVMGLTMQDIINEAAREGHDLLFADNPSAVKKELTILIQNTIRSKWHEVLE

SEQ ID NO: 89 - DNA, 1038 bp, synthetic construct
  misc_feature 1..1038: note = Engineered RNA ligase variants
  source 1..1038: mol_type = other DNA
atgcatcaccatcaccatcacggtggcagcggtatgtttgcgaaatattcaagtctggaaaaccattacaataataagttcattgagaagatccgtggtgcaggcttcgatatgcacaccgtggaatgggtagctcgcgagaagattcatggaacgaactttagcgttatcattactccgaccgaaatcgtcccagccaaacgcacagggccgatcttggaaggcgagtcgttctttggtcacgaaattatcatgaagaaatataaagactcctttgtgaagatgcagaacatgctgaatgccatggatcttgttagcgtgcaaatctttggcgaatttgcgggtggtggcattcagaaaggcgtcgattacggagacaaagatttctatgtgtttgacatcctgtctgatagcgggaacgagaaagtttactgggatgactatgtagtcgaatcgtttgcaaccggcctcggtttaaaattagcgcctctgctgggacgtggtagtttcgaggaactgtcccaatacgtgaacgatttcaaaagcatcgtgaactattataatgaattggttgatacgacggacctggaacatgccaataaacacgtctttggtccgcaagcgtcttctgaaactggcgtagcagaaggctacgttcttaaacccgtcaacccgaaattctttaataatggtacacgcgtggcgattaaatgcaagaactccaaattttcggagaaaaaaaagagcgacaaaccaattaaagcgaaagtggaactgaccgagaacgataaacgtctgctcgaaatctttagcgagtatgttacctggaatcgcgtcagcaacgtaatttcacatattggctcagtgaccgccaaagattttgggaaagttatgggtctgacgatgcaagacatcattaatgaagcagcacgcgaaggccatgatctgttgttcgctgataacccgtcggcggtgaagaaagagctgaccattctcatccaggacacgattcgttcgaaatggcacgaagttctggag

SEQ ID NO: 90 - protein, 346 aa, synthetic construct
  REGION 1..346: note = Engineered RNA ligase variants
MHHHHHHGGSGMFAKYSSLENHYNNKFIEKIRGAGFDMHTVEWVAREKIHGTNFSVIITPTEIVPAKRTGPILEGESFFGHEIIMKKYKDSFVKMQNMLNAMDLVSVQIFGEFAGGGIQKGVDYGDKDFYVFDILSDSGNEKVYWDDYVVESFATGLGLKLAPLLGRGSFEELSQYVNDFKSIVNYYNELVDTTDLEHANKHVFGPQASSETGVAEGYVLKPVNPKFFNNGTRVAIKCKNSKFSEKKKSDKPIKAKVELTENDKRLLEIFSEYVTWNRVSNVISHIGSVTAKDFGKVMGLTMQDIINEAAREGHDLLFADNPSAVKKELTILIQDTIRSKWHEVLE

SEQ ID NO: 91 - DNA, 1038 bp, synthetic construct
  misc_feature 1..1038: note = Engineered RNA ligase variants
  source 1..1038: mol_type = other DNA
atgcatcaccatcaccatcacggtggcagcggtatgtttgcgaaatattcaagtctggaaaaccattacaataataagttcattgagaagatccgtggtgcaggcttcgatatgcacaccgtggaatgggtagctcgcgagaagattcatggaacgaactttagcgttatcattactccgaccgaagttgtcccagccaaacgcacagggccgatcttggaaggcgagtcgttctttggttacgaaattatcatgaagaaatataaagactccttcgtgaagatgcagaacatgctgaatgccatggatcttgttagcgtgcaaatctttggcgaatttgcgggtggtggcattcagaaaggcgtcgattacggagacaaagatttctatgtgtttgacatcctgtctgatagcgggaacgagaaagtttactgggatgactatgtagtcgaatcgtttgcaaccggcctcggtttaaaattagcgcctctgctgggacgtggtagtttcgaggaactgtccaaatacgtgaacgatttcaaaagcgtcgtgaactattataatgaattggttgatacgacggacctggaacatgccaataaacacgtctttggtccgcaagcgtcttctgaaactggcgtagcagaaggctacgttcttaaacccgtcaacccgaaattctttaataatggtacacgcgtggcgattaaatgcaagaactccaaattttcggagaaagccaagagcgacaaaccaattaaagcgaaagtggaactgaccgagaacgataaacgtctgctcgaaatctttagcgagtatgttacctggaatcgcgtcaacaacgtaatttcacatattggctcagtgaccgccaaagattttgggcgtgttatgggtctgacgatgaaagacatcattaatgaagcagcacgcgaaggccatgatatgttgttcgctgataacccgtcggcggtgaagaaagagctgaccattctcatccagaacacgctgcgttcgaaatggcacgaagttctggag

SEQ ID NO: 92 - protein, 346 aa, synthetic construct
  REGION 1..346: note = Engineered RNA ligase variants
MHHHHHHGGSGMFAKYSSLENHYNNKFIEKIRGAGFDMHTVEWVAREKIHGTNFSVIITPTEVVPAKRTGPILEGESFFGYEIIMKKYKDSFVKMQNMLNAMDLVSVQIFGEFAGGGIQKGVDYGDKDFYVFDILSDSGNEKVYWDDYVVESFATGLGLKLAPLLGRGSFEELSKYVNDFKSVVNYYNELVDTTDLEHANKHVFGPQASSETGVAEGYVLKPVNPKFFNNGTRVAIKCKNSKFSEKAKSDKPIKAKVELTENDKRLLEIFSEYVTWNRVNNVISHIGSVTAKDFGRVMGLTMKDIINEAAREGHDMLFADNPSAVKKELTILIQNTLRSKWHEVLE

SEQ ID NO: 93 - DNA, 1038 bp, synthetic construct
  misc_feature 1..1038: note = Engineered RNA ligase variants
  source 1..1038: mol_type = other DNA
atgcatcaccatcaccatcacggtggcagcggtatgtttgcgaaatattcaagtctggaaaaccattacaataataagttcattgagaagatccgtggtgcaggcttcgatatgcacaccgtggaatgggtagctcgcgagaagattcatggaacgaactttagcgttatcattactccgaccgaaattgtcccagccaaacgcacagggccgatcttggaaggcgagtcgttctttggttacgaaattatcatgaagaaatataaagactccttcgtgaagatgcagaacatgctgaatgccatggatcttgttagcgtgcaaatctttggcgaatttgcgggtggtggcattcagaaaggcgtcgattacggagacaaagatttctatgtgtttgacatcctgtctgatagcgggaacgagaaagtttactgggatgactatgtagtcgaatcgtttgcaaccggcctcggtttaaaattagcgcctctgctgggacgtggtagtttcgaggaactgtcccaatacgtgaacgatttcaaaagcattgtgaactattataatgaattggttgatacgacggacctggaacatgccaataaacacgtctttggtccgcaagcgtcttctgaaactggcgtagcagaaggctacgttcttaaacccgtcaacccgaaattctttaataatggtacacgcgtggcgattaaatgcaagaactccaaattttcggagaaagctaagagcgacaaaccaattaaagcgaaagtggaactgaccgagaacgataaacgtgtgctcgaaatctttagcgagtatgttacctggaatcgcgtcagtaacgtactgtcacatattggctcagtgaccgccaaagattttgggcgtgttatgggtctgacgatgcaagacatcattaatgaagcagcacgcgaaggccatgatctgttgttcgctgataacccgtcggcggtgaagaaagagctgaccattctcatccaggacacgattcgttcgaaatggcacgaagttctggag

SEQ ID NO: 94 - protein, 346 aa, synthetic construct
  REGION 1..346: note = Engineered RNA ligase variants
MHHHHHHGGSGMFAKYSSLENHYNNKFIEKIRGAGFDMHTVEWVAREKIHGTNFSVIITPTEIVPAKRTGPILEGESFFGYEIIMKKYKDSFVKMQNMLNAMDLVSVQIFGEFAGGGIQKGVDYGDKDFYVFDILSDSGNEKVYWDDYVVESFATGLGLKLAPLLGRGSFEELSQYVNDFKSIVNYYNELVDTTDLEHANKHVFGPQASSETGVAEGYVLKPVNPKFFNNGTRVAIKCKNSKFSEKAKSDKPIKAKVELTENDKRVLEIFSEYVTWNRVSNVLSHIGSVTAKDFGRVMGLTMQDIINEAAREGHDLLFADNPSAVKKELTILIQDTIRSKWHEVLE

SEQ ID NO: 95 - DNA, 1038 bp, synthetic construct
  misc_feature 1..1038: note = Engineered RNA ligase variants
  source 1..1038: mol_type = other DNA
atgcatcaccatcaccatcacggtggcagcggtatgtttgcgaaatattcaagtctggaaaaccattacaataataagttcattgagaagatccgtggtgcaggcttcgatatgcacaccgtggaatgggtagctcgcgagaagattcatggaacgaactttagcgttatcattactccgaccgaaatcgtcccagccaaacgcacagggccgatcttggaaggcgagtcgttctttggtcacgaaattatcatgaagaaatataaagactccttcgtgaagatgcagaacatgctgaatgccatggatcttgttagcgtgcaaatctttggcgaatttgcgggtggtggcattcagaaaggcgtcgattacggagacaaagatttctatgtgtttgacatcctgtctgatagcgggaacgagaaagtttactgggatgactatgtagtcgaatcgtttgcaaccggcctcggtttaaaattagcgcctctgctgggacgtggtagtttcgctgaactgtcccagtacgtgaacgatttcaaaagcattgtgaactattataatgaattggttgatacgacggacctggaacatgccaataaacacgtctttggtccgcaagcgtcttctgaaactggcgtagcagaaggctacgttcttaaacccgtcaacccgaaattctttaataatggtacacgcgtggcgattaaatgcaagaactccaaattttcggagaaagccaagagcgacaaaccaattaaagcgaaagtggaactgacggagaacgataaacgtgtgctcgaaatctttagcgagtatgttacctggaatcgcgtcagtaacgtactgtcacacattggcgaggtgaccgcaaaagattttgggcgtgttatgggtctgacgatgaaagacatcattgaggaagcagcacgcgaaggccatgatatgttgttcgctgataacccgtcggcggtgaagaaagagctgaccattctcatccagaacacgattcgttccaaatggcacgaagttctggag

SEQ ID NO: 96 - protein, 346 aa, synthetic construct
  REGION 1..346: note = Engineered RNA ligase variants
MHHHHHHGGSGMFAKYSSLENHYNNKFIEKIRGAGFDMHTVEWVAREKIHGTNFSVIITPTEIVPAKRTGPILEGESFFGHEIIMKKYKDSFVKMQNMLNAMDLVSVQIFGEFAGGGIQKGVDYGDKDFYVFDILSDSGNEKVYWDDYVVESFATGLGLKLAPLLGRGSFAELSQYVNDFKSIVNYYNELVDTTDLEHANKHVFGPQASSETGVAEGYVLKPVNPKFFNNGTRVAIKCKNSKFSEKAKSDKPIKAKVELTENDKRVLEIFSEYVTWNRVSNVLSHIGEVTAKDFGRVMGLTMKDIIEEAAREGHDMLFADNPSAVKKELTILIQNTIRSKWHEVLE

SEQ ID NO: 97 - DNA, 1038 bp, synthetic construct
  misc_feature 1..1038: note = Engineered RNA ligase variants
  source 1..1038: mol_type = other DNA
atgcatcaccatcaccatcacggtggcagcggtatgtttaaaaaatattcaagtctggaaaaccattacaataataagttcattgagaagatccgtggtgcaggcttcgatatgcacaccgtggaatgggtagctcgcgagaagattcatggaacgaactttagcgttatcattactccgaccgaaatcgtcccagccaaacgcacagggccgatcttggaaggcgagtcgttctttggtcacgaaattatcatgaagaaatataaagactccttcgtgaaggtgcagaacatgctgaatgccatggatcttgttagcgtgcaaatctttggcgaatttgcgggtggtggcattcagaaaggcgtcgattacggagacaaagatttctatgtgtttgacatcctgtctgatagcgggaacgagaaagtttactgggatgactatgtagtcgaatcgtttgcaaccggcctcggtttcaaattagcgcctctgctgggacgtggtagtttcgctgaactgtcccagtacccaaacgatttcaaaagcattgtgaactattataatgaattggttgatacgacggacctggaacatgccaataaacacgtctttggtccgcaagcgtcttctgaaactggcgtagcagaaggctacgttcttaaacccgtcaacccgaaattctttaataatggtacacgcgtggcgattaaatgcaagaactccaaattttcggagaaagccaagagcgacaaaccaattaaagcgaaagtggaactgacggagaacgataaacgtgtgctcgaaatctttagcgagtatgttacctggaatcgcgtcagtaacgtactgtcacatattggctcagtgaccgccaaagattttgggcgtgttatgggtctgacgatgaaagacatcattaacgaagcagcacgcgaaggccatgatatgttgttcgctgataacccgtcggcggtgaagaaagagctgaccattctcatccagaacacgattcgttccaaatggcacgaagtggtggag

SEQ ID NO: 98 - protein, 346 aa, synthetic construct
  REGION 1..346: note = Engineered RNA ligase variants
MHHHHHHGGSGMFKKYSSLENHYNNKFIEKIRGAGFDMHTVEWVAREKIHGTNFSVIITPTEIVPAKRTGPILEGESFFGHEIIMKKYKDSFVKVQNMLNAMDLVSVQIFGEFAGGGIQKGVDYGDKDFYVFDILSDSGNEKVYWDDYVVESFATGLGFKLAPLLGRGSFAELSQYPNDFKSIVNYYNELVDTTDLEHANKHVFGPQASSETGVAEGYVLKPVNPKFFNNGTRVAIKCKNSKFSEKAKSDKPIKAKVELTENDKRVLEIFSEYVTWNRVSNVLSHIGSVTAKDFGRVMGLTMKDIINEAAREGHDMLFADNPSAVKKELTILIQNTIRSKWHEVVE

SEQ ID NO: 99 - DNA, 1038 bp, synthetic construct
  misc_feature 1..1038: note = Engineered RNA ligase variants
  source 1..1038: mol_type = other DNA
atgcatcaccatcaccatcacggtggcagcggtatgtttgcgaaatattcaagtctggaaaaccattacaataataagttcattgagaagatccgtggtgcaggcttcgatatgcacaccgtggaatgggtagctcgcgagaagattcatggaacgaactttagcgttatcattactccgaccgaaattgtcccagccaaacgcacagggccgatcttggaaggcgagtcgttctttggttacgaaattatcatgaagaaatataaagactccttcgtgaagatgcagaacatgctgaatgccatggatcttgttagcgtgcaaatctttggcgaatttgcgggtggtggcattcagaaaggcgtcgattacggagacaaagatttctatgtgtttgacatcctgtctgatagcgggaacgagaaagtttactgggatgactatgtagtcgaatcgtttgcaaccggcctcggtttaaaattagcgcctctgctgggacgtggtagtttcgaggaactgtccaaatacgtgaacgatttcaaaagcgtcgtgaactattataatgaattggttgatacgacggacctggaacatgccaataaacacgtctttggtccgcaagcgtcttctgaaactggcgtagcagaaggctacgttcttaaacccgtcaacccgaaattctttaataatggtacacgcgtggcgattaaatgcaagaactccaaattttcggagaaaaaaaagagcgacaaaccaattaaagcgaaagtggaactgaccgagaacgataaacgtctgctcgaaatctttagcgagtatgttacctggaatcgcgtcaacaacgtaatttcacatattggctcagtgaccgccaaagattttgggcgtgttatgggtctgacgatgaaagacatcattaatgaagcagcacgcgaaggccatgatatgttgttcgctgataacccgtcggcggtgaagaaagagctgaccattctcatccagaacacgattcgttccaaatggcacgaagttctggag

SEQ ID NO: 100 - protein, 346 aa, synthetic construct
  REGION 1..346: note = Engineered RNA ligase variants
MHHHHHHGGSGMFAKYSSLENHYNNKFIEKIRGAGFDMHTVEWVAREKIHGTNFSVIITPTEIVPAKRTGPILEGESFFGYEIIMKKYKDSFVKMQNMLNAMDLVSVQIFGEFAGGGIQKGVDYGDKDFYVFDILSDSGNEKVYWDDYVVESFATGLGLKLAPLLGRGSFEELSKYVNDFKSVVNYYNELVDTTDLEHANKHVFGPQASSETGVAEGYVLKPVNPKFFNNGTRVAIKCKNSKFSEKKKSDKPIKAKVELTENDKRLLEIFSEYVTWNRVNNVISHIGSVTAKDFGRVMGLTMKDIINEAAREGHDMLFADNPSAVKKELTILIQNTIRSKWHEVLE

SEQ ID NO: 101 - DNA, 1038 bp, synthetic construct
  misc_feature 1..1038: note = Engineered RNA ligase variants
  source 1..1038: mol_type = other DNA
atgcatcaccatcaccatcacggtggcagcggtatgtttgcgaaatattcaagtctggaaaaccattacaataataagttcattgagaagatccgtggtgcaggcttcgatatgcacaccgtggaatgggtagctcgcgagaagattcatggaacgaactttagcgttatcattactccgaccgaaattgtcccagccaaacgcacagggccgatcttggaaggcgagtcgttctttggttacgaaattatcatgaagaaatataaagactccttcgtgaagatgcagaacatgctgaatgccatggatcttgttagcgtgcaaatctttggcgaatttgcgggtggtggcattcagaaaggcgtcgattacggagacaaagatttctatgtgtttgacatcctgtctgatagcgggaacgagaaagtttactgggatgactatgtagtcgaatcgtttgcaaccggcctcggtttaaaattagcgcctctgctgggacgtggtagtttcgctgaactgtcccagtacgtgaacgatttcaaaagcattgtgaactattataatgaattggttgatacgacggacctggaacatgccaataaacacgtctttggtccgcaagcgtcttctgaaactggcgtagcagaaggctacgttcttaaacccgtcaacccgaaattctttaataatggtacacgcgtggcgattaaatgcaagaactccaaattttcggagaaaaaaaagagcgacaaaccaattaaagcgaaagtggaactgaccgagaacgataaacgtctgctcgaaatctttagcgagtatgttacctggaatcgcgtcagtaacgtactgtcacatattggctcagtgaccgccaaagattttgggcgtgttatgggtctgacgatgaaagacatcattaatgaagcagcacgcgaaggccatgatatgttgttcgctgataacccgtcggcggtgaagaaagagctgaccattctcatccagaacacgattcgttccaaatggcacgaagttctggag

SEQ ID NO: 102 - protein, 346 aa, synthetic construct
  REGION 1..346: note = Engineered RNA ligase variants
MHHHHHHGGSGMFAKYSSLENHYNNKFIEKIRGAGFDMHTVEWVAREKIHGTNFSVIITPTEIVPAKRTGPILEGESFFGYEIIMKKYKDSFVKMQNMLNAMDLVSVQIFGEFAGGGIQKGVDYGDKDFYVFDILSDSGNEKVYWDDYVVESFATGLGLKLAPLLGRGSFAELSQYVNDFKSIVNYYNELVDTTDLEHANKHVFGPQASSETGVAEGYVLKPVNPKFFNNGTRVAIKCKNSKFSEKKKSDKPIKAKVELTENDKRLLEIFSEYVTWNRVSNVLSHIGSVTAKDFGRVMGLTMKDIINEAAREGHDMLFADNPSAVKKELTILIQNTIRSKWHEVLE

SEQ ID NO: 103 - DNA, 1038 bp, synthetic construct
  misc_feature 1..1038: note = Engineered RNA ligase variants
  source 1..1038: mol_type = other DNA
atgcatcaccatcaccatcacggtggcagcggtatgtttgcgaaatattcaagtctggaaaaccattacaataataagttcattgagaagatccgtggtgcaggcttcgatatgcacaccgtggaatgggtagctcgcgagaagattcatggaacgaactttagcgttatcattactccgaccgaaattgtcccagccaaacgcacagggccgatcttggaaggcgagtcgttctttggtcacgaaattatcatgaagaaatataaagactccttcgtgaagatgcagaacatgctgaatgccatggatcttgttagcgtgcaaatctttggcgaatttgcgggtggtggcattcagaaaggcgtcgattacggagacaaagatttctatgtgtttgacatcctgtctgatagcgggaacgagaaagtttactgggatgactatgtagtcgaatcgtttgcaaccggcctcggtttaaaattagcgcctctgctgggacgtggtagtttcgctgaactgtcccagtacgtgaacgatttcaaaagcattgtgaactattataatgaattggttgatacgacggacctggaacatgccaataaacacgtctttggtccgcaagcgtcttctgaaactggcgtagcagaaggctacgttcttaaacccgtcaacccgaaattctttaataatggtacacgcgtggcgattaaatgcaagaactccaaattttcggagaaagccaagagcgacaaaccaattaaagcgaaagtggaactgaccgagaacgataaacgtgtgctcgaaatctttagcgagtatgttacctggaatcgcgtcaacaacgtactgtcacatattggctcagtgaccgccaaagattttgggcgtgttatgggtctgacgatgaaagacatcattaatgaagcagcacgcgaaggccatgatatgttgttcgctgataacccgtcggcggtgaagaaagagctgaccattctcatccagaacacgattcgttccaaatggcacgaagttctggag

SEQ ID NO: 104 - protein, 346 aa, synthetic construct
  REGION 1..346: note = Engineered RNA ligase variants
MHHHHHHGGSGMFAKYSSLENHYNNKFIEKIRGAGFDMHTVEWVAREKIHGTNFSVIITPTEIVPAKRTGPILEGESFFGHEIIMKKYKDSFVKMQNMLNAMDLVSVQIFGEFAGGGIQKGVDYGDKDFYVFDILSDSGNEKVYWDDYVVESFATGLGLKLAPLLGRGSFAELSQYVNDFKSIVNYYNELVDTTDLEHANKHVFGPQASSETGVAEGYVLKPVNPKFFNNGTRVAIKCKNSKFSEKAKSDKPIKAKVELTENDKRVLEIFSEYVTWNRVNNVLSHIGSVTAKDFGRVMGLTMKDIINEAAREGHDMLFADNPSAVKKELTILIQNTIRSKWHEVLE

SEQ ID NO: 105 - DNA, 1038 bp, synthetic construct
  misc_feature 1..1038: note = Engineered RNA ligase variants
  source 1..1038: mol_type = other DNA
atgcatcaccatcaccatcacggtggcagcggtatgtttgcaaaatattcaagtctggaaaaccattacaataataagttcattgagaagatccgtggtgcaggcttcgatatgcacaccgtggaatgggtagctcgcgagaagattcatggaacgaactttagcgttatcattactccgaccgaaatcgtcccagccaaacgcacagggccgatcttggaaggcgagtcgttctttggtcacgaaattatcctgaagaaatataaagactccttcgtgaagatgcagaacatgctgaatgccatggatcttgttagcgtgcaaatctttggcgaatttgcgggtggtggcattcagaaaggcgtcgattacggagacaaagatttctatgtgtttgacatcctgtctgatagcgggaacgagaaagtttactgggatgactatgtagtcgaatcgtttgcaaccggcctcggtctgaaattagcgcctctgctgggacgtggtagtttcgctgaactgtcccagtacccaaacgatttcaaaagcattgtgaactattataatgaattggttgatacgacggacctggaacatgccaataaacacgtctttggtccgcaagcgtcttctgaaactggcgtagcagaaggctacgttcttaaacccgtcaacccgaaattctttaataatggtacacgcgtggcgattaaatgcaagaactccaaattttcggagaaagccaagagcgacaaaccaattaaagcgaaagtggaactgtcggagaacgataaacgtgtgctcgaaatctttagcgagtatgttacctggaatcgcgtcagtaacgtactgtcacatattggctcagtgaccgccaaagattttgggcgtgttatgggtctgacgatgaaagacatcattaacgaagcagcacgcgaaggccatgatatgttgttcgctgataacccgtcggcggtgaagaaagagctgaccattctcatccagaacacgattcgttccaaatggcacgaagttctggag

SEQ ID NO: 106 - protein, 346 aa, synthetic construct
  REGION 1..346: note = Engineered RNA ligase variants
MHHHHHHGGSGMFAKYSSLENHYNNKFIEKIRGAGFDMHTVEWVAREKIHGTNFSVIITPTEIVPAKRTGPILEGESFFGHEIILKKYKDSFVKMQNMLNAMDLVSVQIFGEFAGGGIQKGVDYGDKDFYVFDILSDSGNEKVYWDDYVVESFATGLGLKLAPLLGRGSFAELSQYPNDFKSIVNYYNELVDTTDLEHANKHVFGPQASSETGVAEGYVLKPVNPKFFNNGTRVAIKCKNSKFSEKAKSDKPIKAKVELSENDKRVLEIFSEYVTWNRVSNVLSHIGSVTAKDFGRVMGLTMKDIINEAAREGHDMLFADNPSAVKKELTILIQNTIRSKWHEVLE

SEQ ID NO: 107 - DNA, 1038 bp, synthetic construct
  misc_feature 1..1038: note = Engineered RNA ligase variants
  source 1..1038: mol_type = other DNA
atgcatcaccatcaccatcacggtggcagcggtatgtttgcgaaatattcaagtctggaaaaccattacaataataagttcattgagaagatccgtggtgcaggcttcgatatgcacaccgtggaatgggtagctcgcgagaagattcatggaacgaactttagcgttatcattactccgaccgaagttgtcccagccaaacgcacagggccgatcttggaaggcgagtcgttctttggtcacgaaattatcatgaagaaatataaagactccttcgtgaagatgcagaacatgctgaatgccatggatcttgttagcgtgcaaatctttggcgaatttgcgggtggtggcattcagaaaggcgtcgattacggagacaaagatttctatgtgtttgacatcctgtctgatagcgggaacgagaaagtttactgggatgactatgtagtcgaatcgtttgcaaccggcctcggtttaaaattagcgcctctgctgggacgtggtagtttcgctgaactgtcccagtacgtgaacgatttcaaaagcgtcgtgaactattataatgaattggttgatacgacggacctggaacatgccaataaacacgtctttggtccgcaagcgtcttctgaaactggcgtagcagaaggctacgttcttaaacccgtcaacccgaaattctttaataatggtacacgcgtggcgattaaatgcaagaactccaaattttcggagaaagctaagagcgacaaaccaattaaagcgaaagtggaactgaccgagaacgataaacgtgtgctcgaaatctttagcgagtatgttacctggaatcgcgtcagtaacgtactgtcacatattggctcagtgaccgccaaagattttgggcgtgttatgggtctgacgatgaaagacatcattaatgaagcagcacgcgaaggccatgatatgttgttcgctgataacccgtcggcggtgaagaaagagctgaccattctcatccagaacacgattcgttccaaatggcacgaagttctggag

SEQ ID NO: 108 - protein, 346 aa, synthetic construct
  REGION 1..346: note = Engineered RNA ligase variants
MHHHHHHGGSGMFAKYSSLENHYNNKFIEKIRGAGFDMHTVEWVAREKIHGTNFSVIITPTEVVPAKRTGPILEGESFFGHEIIMKKYKDSFVKMQNMLNAMDLVSVQIFGEFAGGGIQKGVDYGDKDFYVFDILSDSGNEKVYWDDYVVESFATGLGLKLAPLLGRGSFAELSQYVNDFKSVVNYYNELVDTTDLEHANKHVFGPQASSETGVAEGYVLKPVNPKFFNNGTRVAIKCKNSKFSEKAKSDKPIKAKVELTENDKRVLEIFSEYVTWNRVSNVLSHIGSVTAKDFGRVMGLTMKDIINEAAREGHDMLFADNPSAVKKELTILIQNTIRSKWHEVLE

SEQ ID NO: 109 - DNA, 1038 bp, synthetic construct
  misc_feature 1..1038: note = Engineered RNA ligase variants
  source 1..1038: mol_type = other DNA
atgcatcaccatcaccatcacggtggcagcggtatgtttgcgaaatattcaagtctggaaaaccattacaataataagttcattgagaagatccgtggtgcaggcttcgatatgcacaccgtggaatgggtagctcgcgagaagattcatggaacgaactttagcgttatcattactccgaccgaaattgtcccagccaaacgcacagggccgatcttggaaggcgagtcgttctttggtcacgaaattatcatgaagaaatataaagactccttcgtgaagatgcagaacatgctgaatgccatggatcttgttagcgtgcaaatctttggcgaatttgcgggtggtggcattcagaaaggcgtcgattacggagacaaagatttctatgtgtttgacatcctgtctgatagcgggaacgagaaagtttactgggatgactatgtagtcgaatcgtttgcaaccggcctcggtttaaaattagcgcctctgctgggacgtggtagtttcgcggaactgtccaaatacgtgaacgatttcaaaagcgtcgtgaactattataatgaattggttgatacgacggacctggaacatgccaataaacacgtctttggtccgcaagcgtcttctgaaactggcgtagcagaaggctacgttcttaaacccgtcaacccgaaattctttaataatggtacacgcgtggcgattaaatgcaagaactccaaattttcggagaaaaaaaagagcgacaaaccaattaaagcgaaagtggaactgaccgagaacgataaacgtgtgctcgaaatctttagcgagtatgttacctggaatcgcgtcaacaacgtaatttcacatattggctcagtgaccgccaaagattttgggcgtgttatgggtctgacgatgaaagacatcattaatgaagcagcacgcgaaggccatgatctgttgttcgctgataacccgtcggcggtgaagaaagagctgaccattctcatccagaacacgattcgttccaaatggcacgaagttctggag

SEQ ID NO: 110 - protein, 346 aa, synthetic construct
  REGION 1..346: note = Engineered RNA ligase variants
MHHHHHHGGSGMFAKYSSLENHYNNKFIEKIRGAGFDMHTVEWVAREKIHGTNFSVIITPTEIVPAKRTGPILEGESFFGHEIIMKKYKDSFVKMQNMLNAMDLVSVQIFGEFAGGGIQKGVDYGDKDFYVFDILSDSGNEKVYWDDYVVESFATGLGLKLAPLLGRGSFAELSKYVNDFKSVVNYYNELVDTTDLEHANKHVFGPQASSETGVAEGYVLKPVNPKFFNNGTRVAIKCKNSKFSEKKKSDKPIKAKVELTENDKRVLEIFSEYVTWNRVNNVISHIGSVTAKDFGRVMGLTMKDIINEAAREGHDLLFADNPSAVKKELTILIQNTIRSKWHEVLE

SEQ ID NO: 111 - DNA, 1038 bp, synthetic construct
  misc_feature 1..1038: note = Engineered RNA ligase variants
  source 1..1038: mol_type = other DNA
atgcatcaccatcaccatcacggtggcagcggtatgtttgcgaaatattcaagtctggaaaaccattacaataataagttcattgagaagatccgtggtgcaggcttcgatatgcacaccgtggaatgggtagctcgcgagaagattcatggaacgaactttagcgttatcattactccgaccgaaatcgtcccagccaaacgcacagggccgatcttggaaggcgagtcgttctttggtcacgaaattatcatgaagaaatataaagactccttcgtgaagatgcagaacatgctgaatgccatggatcttgttagcgtgcaaatctttggcgaatttgcgggtggtggcattcagaaaggcgtcgattacggagacaaagatttctatgtgtttgacatcctgtctgatagcgggaacgagaaagtttactgggatgactatgtagtcgaatcgtttgcaaccggcctcggtctgaaattagcgcctctgctgggacgtggtagtttcgctgaactgtcccagtacgtgaacgatttcaaaagcattgtgaactattataatgaattggttgatacgacggacctggaacatgccaataaacacgtctttggtccgcaagcgtcttctgaaactggcgtagcagaaggctacgttcttaaacccgtcaacccgaaattctttaataatggtacacgcgtggcgattaaatgcaagaactccaaattttcggagaaagccaagagcgacaaaccaattaaagcgaaagtggaactgaccgagaacgataaacgtgtgctcgaaatctttagcgagtatgttacctggaatcgcgtcagtaacgtactgtcacacattggcagtgtgaccccaaaagattttgggcgtgttatgggtctgacgatgaaagacatcattaatgaagcagcacgcgaaggccatgatatgttgttcgctgataacccgtcggcggtgaagaaagagctgaccattctcatccagaacacgattcgttccaaatggcacgaagttctggag

SEQ ID NO: 112 - protein, 346 aa, synthetic construct
  REGION 1..346: note = Engineered RNA ligase variants
MHHHHHHGGSGMFAKYSSLENHYNNKFIEKIRGAGFDMHTVEWVAREKIHGTNFSVIITPTEIVPAKRTGPILEGESFFGHEIIMKKYKDSFVKMQNMLNAMDLVSVQIFGEFAGGGIQKGVDYGDKDFYVFDILSDSGNEKVYWDDYVVESFATGLGLKLAPLLGRGSFAELSQYVNDFKSIVNYYNELVDTTDLEHANKHVFGPQASSETGVAEGYVLKPVNPKFFNNGTRVAIKCKNSKFSEKAKSDKPIKAKVELTENDKRVLEIFSEYVTWNRVSNVLSHIGSVTPKDFGRVMGLTMKDIINEAAREGHDMLFADNPSAVKKELTILIQNTIRSKWHEVLE

SEQ ID NO: 113 - DNA, 1038 bp, synthetic construct
  misc_feature 1..1038: note = Engineered RNA ligase variants
  source 1..1038: mol_type = other DNA
atgcatcaccatcaccatcacggtggcagcggtatgtttgcgaaatattcaagtctggaaaaccattacaataataagttcattgagaagatccgtggtgcaggcttcgatatgcacaccgtggaatgggtagctcgcgagaagattcatggaacgaactttagcgttatcattactccgaccgaaatcgtcccagccaaacgcacagggccgatcttggaaggcgagtcgttctttggtcacgaaattatcatgaagaaatataaagactcctttgtgaagatgcagaacatgctgaatgccatggatcttgttagcgtgcaaatctttggcgaatttgcgggtggtggcattcagaaaggcgtcgattacggagacaaagatttctatgtgtttgacatcctgtctgatagcgggaacgagaaagtttactgggatgactatgtagtcgaatcgtttgcaaccggcctcggtttaaaattagcgcctctgctgggacgtggtagtttcgcggaactgtcccaatacgtgaacgatttcaaaagcattgtgaactattataatgaattggttgatacgacggacctggaacatgccaataaacacgtctttggtccgcaagcgtcttctgaaactggcgtagcagaaggctacgttcttaaacccgtcaacccgaaattctttaataatggtacacgcgtggcgattaaatgcaagaactccaaattttcggagaaaaaaaagagcgacaaaccaattaaagcgaaagtggaactgaccgagaacgataaacgtgtgctcgaaatctttagcgagtatgttacctggaatcgcgtcagcaacgtactgtcacatattggctcagtgaccgccaaagattttgggcgtgttatgggtctgacgatgaaagacatcattaatgaagcagcacgcgaaggccatgatatgttgttcgctgataacccgtcggcggtgaagaaagagctgaccattctcatccagaacacgattcgttccaaatggcacgaagttctggag

SEQ ID NO: 114 - protein, 346 aa, synthetic construct
  REGION 1..346: note = Engineered RNA ligase variants
MHHHHHHGGSGMFAKYSSLENHYNNKFIEKIRGAGFDMHTVEWVAREKIHGTNFSVIITPTEIVPAKRTGPILEGESFFGHEIIMKKYKDSFVKMQNMLNAMDLVSVQIFGEFAGGGIQKGVDYGDKDFYVFDILSDSGNEKVYWDDYVVESFATGLGLKLAPLLGRGSFAELSQYVNDFKSIVNYYNELVDTTDLEHANKHVFGPQASSETGVAEGYVLKPVNPKFFNNGTRVAIKCKNSKFSEKKKSDKPIKAKVELTENDKRVLEIFSEYVTWNRVSNVLSHIGSVTAKDFGRVMGLTMKDIINEAAREGHDMLFADNPSAVKKELTILIQNTIRSKWHEVLE

SEQ ID NO: 115 - DNA, 1038 bp, synthetic construct
  misc_feature 1..1038: note = Engineered RNA ligase variants
  source 1..1038: mol_type = other DNA
atgcatcaccatcaccatcacggtggcagcggtatgtttgcgaaatattcaagtctggaaaaccattacaataataagttcattgagaagatccgtggtgcaggcttcgatatgcacaccgtggaatgggtagctcgcgagaagattcatggaacgaactttagcgttatcattactccgaccgaaattgtcccagccaaacgcacagggccgatcttggaaggcgagtcgttctttggtcacgaaattatcatgaagaaatataaagactccttcgtgaagatgcagaacatgctgaatgccatggatcttgttagcgtgcaaatctttggcgaatttgcgggtggtggcattcagaaaggcgtcgattacggagacaaagatttctatgtgtttgacatcctgtctgatagcgggaacgagaaagtttactgggatgactatgtagtcgaatcgtttgcaaccggcctcggtttaaaattagcgcctctgctgggacgtggtagtttcgaggaactgtcccaatacgtgaacgatttcaaaagcattgtgaactattataatgaattggttgatacgacggacctggaacatgccaataaacacgtctttggtccgcaagcgtcttctgaaactggcgtagcagaaggctacgttcttaaacccgtcaacccgaaattctttaataatggtacacgcgtggcgattaaatgcaagaactccaaattttcggagaaagctaagagcgacaaaccaattaaagcgaaagtggaactgaccgagaacgataaacgtgtgctcgaaatctttagcgagtatgttacctggaatcgcgtcaacaacgtaatttcacatattggctcagtgaccgccaaagattttgggcgtgttatgggtctgacgatgaaagacatcattaatgaagcagcacgcgaaggccatgatatgttgttcgctgataacccgtcggcggtgaagaaagagctgaccattctcatccagaacacgattcgttccaaatggcacgaagttctggag

SEQ ID NO: 116 - protein, 346 aa, synthetic construct
  REGION 1..346: note = Engineered RNA ligase variants
MHHHHHHGGSGMFAKYSSLENHYNNKFIEKIRGAGFDMHTVEWVAREKIHGTNFSVIITPTEIVPAKRTGPILEGESFFGHEIIMKKYKDSFVKMQNMLNAMDLVSVQIFGEFAGGGIQKGVDYGDKDFYVFDILSDSGNEKVYWDDYVVESFATGLGLKLAPLLGRGSFEELSQYVNDFKSIVNYYNELVDTTDLEHANKHVFGPQASSETGVAEGYVLKPVNPKFFNNGTRVAIKCKNSKFSEKAKSDKPIKAKVELTENDKRVLEIFSEYVTWNRVNNVISHIGSVTAKDFGRVMGLTMKDIINEAAREGHDMLFADNPSAVKKELTILIQNTIRSKWHEVLE

SEQ ID NO: 117 - DNA, 1038 bp, synthetic construct
  misc_feature 1..1038: note = Engineered RNA ligase variants
  source 1..1038: mol_type = other DNA
atgcatcaccatcaccatcacggtggcagcggtatgtttgcgaaatattcaagtctggaaaaccattacaataataagttcattgagaagatccgtggtgcaggcttcgatatgcacaccgtggaatgggtagctcgcgagaagattcatggaacgaactttagcgttatcattactccgaccgaaattgtcccagccaaacgcacagggccgatcttggaaggcgagtcgttctttggttacgaaattatcatgaagaaatataaagactcctttgtgaagatgcagaacatgctgaatgccatggatcttgttagcgtgcaaatctttggcgaatttgcgggtggtggcattcagaaaggcgtcgattacggagacaaagatttctatgtgtttgacatcctgtctgatagcgggaacgagaaagtttactgggatgactatgtagtcgaatcgtttgcaaccggcctcggtttaaaattagcgcctctgctgggacgtggtagtttcgaggaactgtccaaatacgtgaacgatttcaaaagcattgtgaactattataatgaattggttgatacgacggacctggaacatgccaataaacacgtctttggtccgcaagcgtcttctgaaactggcgtagcagaaggctacgttcttaaacccgtcaacccgaaattctttaataatggtacacgcgtggcgattaaatgcaagaactccaaattttcggagaaagccaagagcgacaaaccaattaaagcgaaagtggaactgaccgagaacgataaacgtgtgctcgaaatctttagcgagtatgttacctggaatcgcgtcaacaacgtactgtcacatattggctcagtgaccgccaaagattttgggcgtgttatgggtctgacgatgaaagacatcattaatgaagcagcacgcgaaggccatgatctgttgttcgctgataacccgtcggcggtgaagaaagagctgaccattctcatccagaacacgattcgttccaaatggcacgaagttctggag

SEQ ID NO: 118 - protein, 346 aa, synthetic construct
  REGION 1..346: note = Engineered RNA ligase variants
MHHHHHHGGSGMFAKYSSLENHYNNKFIEKIRGAGFDMHTVEWVAREKIHGTNFSVIITPTEIVPAKRTGPILEGESFFGYEIIMKKYKDSFVKMQNMLNAMDLVSVQIFGEFAGGGIQKGVDYGDKDFYVFDILSDSGNEKVYWDDYVVESFATGLGLKLAPLLGRGSFEELSKYVNDFKSIVNYYNELVDTTDLEHANKHVFGPQASSETGVAEGYVLKPVNPKFFNNGTRVAIKCKNSKFSEKAKSDKPIKAKVELTENDKRVLEIFSEYVTWNRVNNVLSHIGSVTAKDFGRVMGLTMKDIINEAAREGHDLLFADNPSAVKKELTILIQNTIRSKWHEVLE

SEQ ID NO: 119 - DNA, 1038 bp, synthetic construct
  misc_feature 1..1038: note = Engineered RNA ligase variants
  source 1..1038: mol_type = other DNA
atgcatcaccatcaccatcacggtggcagcggtatgtttgcgaaatattcaagtctggaaaaccattacaataataagttcattgagaagatccgtggtgcaggcttcgatatgcacaccgtggaatgggtagctcgcgagaagattcatggaacgaactttagcgttatcattactccgaccgaaatcgtcccagccaaacgcacagggccgatcttggaaggcgagtcgttctttggtcacgaaattatcatgaagaaatataaagactccttcgtgaagatgcagaacatgctgaatgccatggatcttgttagcgtgcaaatctttggcgaatttgcgggtggtggcattcagaaaggcgtcgattacggagacaaagatttctatgtgtttgacatcctgtctgatagcgggaacgagaaagtttactgggatgactatgtagtcgaatcgtttgcaaccggcctcggtttaaaattagcgcctctgctgggacgtggtagtttcgctgaactgtcccagtacgtgaacgatttcaaaagcattgtgaactattataatgaattggttgatacgacggacctggaacatgccaataaacacgtctttggtccgcaagcgtcttctgaaactggcgtagcagaaggctacgttcttaaacccgtcaacccgaaattctttaataatggtacacgcgtggcgattaaatgcaagaactccaaattttcggagaaagccaagagcgacaaaccaattaaagcgaaagtggaactgaccgagaacgataaacgtgtgctcgaaatctttagcgagtatgttacctggaatcgcgtcagtaacgtactgtcacatattggctcagtgaccgccaaagattttgggcgtgttatgggtctgacgatgaaagacatcattaatgaagcagcacgcgaaggccatgatatgttgttcgctgataacccgtcggcggtgaagaaagagctgaccattctcgtccagaacacgattcgttccaaatggcacgaagttctggag

SEQ ID NO: 120 - protein, 346 aa, synthetic construct
  REGION 1..346: note = Engineered RNA ligase variants
MHHHHHHGGSGMFAKYSSLENHYNNKFIEKIRGAGFDMHTVEWVAREKIHGTNFSVIITPTEIVPAKRTGPILEGESFFGHEIIMKKYKDSFVKMQNMLNAMDLVSVQIFGEFAGGGIQKGVDYGDKDFYVFDILSDSGNEKVYWDDYVVESFATGLGLKLAPLLGRGSFAELSQYVNDFKSIVNYYNELVDTTDLEHANKHVFGPQASSETGVAEGYVLKPVNPKFFNNGTRVAIKCKNSKFSEKAKSDKPIKAKVELTENDKRVLEIFSEYVTWNRVSNVLSHIGSVTAKDFGRVMGLTMKDIINEAAREGHDMLFADNPSAVKKELTILVQNTIRSKWHEVLE

SEQ ID NO: 121 - DNA, 1038 bp, synthetic construct
  misc_feature 1..1038: note = Engineered RNA ligase variants
  source 1..1038: mol_type = other DNA
atgcatcaccatcaccatcacggtggcagcggtatgtttgcgaaatattcaagtctggaaaaccattacaataataagttcattgagaagatccgtggtgcaggcttcgatatgcacaccgtggaatgggtagctcgcgagaagattcatggaacgaactttagcgttatcattactccgaccgaaattgtcccagccaaacgcacagggccgatcttggaaggcgagtcgttctttggtcacgaaattatcatgaagaaatataaagactcctttgtgaagatgcagaacatgctgaatgccatggatcttgttagcgtgcaaatctttggcgaatttgcgggtggtggcattcagaaaggcgtcgattacggagacaaagatttctatgtgtttgacatcctgtctgatagcgggaacgagaaagtttactgggatgactatgtagtcgaatcgtttgcaaccggcctcggtttaaaattagcgcctctgctgggacgtggtagtttcgaggaactgtcccaatacgtgaacgatttcaaaagcattgtgaactattataatgaattggttgatacgacggacctggaacatgccaataaacacgtctttggtccgcaagcgtcttctgaaactggcgtagcagaaggctacgttcttaaacccgtcaacccgaaattctttaataatggtacacgcgtggcgattaaatgcaagaactccaaattttcggagaaagccaagagcgacaaaccaattaaagcgaaagtggaactgaccgagaacgataaacgtgtgctcgaaatctttagcgagtatgttacctggaatcgcgtcagcaacgtactgtcacatattggctcagtgaccgccaaagattttgggaaagttatgggtctgacgatgaaagacatcattaatgaagcagcacgcgaaggccatgatctgttgttcgctgataacccgtcggcggtgaagaaagagctgaccattctcatccagaacacgattcgttccaaatggcacgaagttctggag

SEQ ID NO: 122 - protein, 346 aa, synthetic construct
  REGION 1..346: note = Engineered RNA ligase variants
MHHHHHHGGSGMFAKYSSLENHYNNKFIEKIRGAGFDMHTVEWVAREKIHGTNFSVIITPTEIVPAKRTGPILEGESFFGHEIIMKKYKDSFVKMQNMLNAMDLVSVQIFGEFAGGGIQKGVDYGDKDFYVFDILSDSGNEKVYWDDYVVESFATGLGLKLAPLLGRGSFEELSQYVNDFKSIVNYYNELVDTTDLEHANKHVFGPQASSETGVAEGYVLKPVNPKFFNNGTRVAIKCKNSKFSEKAKSDKPIKAKVELTENDKRVLEIFSEYVTWNRVSNVLSHIGSVTAKDFGKVMGLTMKDIINEAAREGHDLLFADNPSAVKKELTILIQNTIRSKWHEVLE

SEQ ID NO: 123 - DNA, 1038 bp, synthetic construct
  misc_feature 1..1038: note = Engineered RNA ligase variants
  source 1..1038: mol_type = other DNA
atgcatcaccatcaccatcacggtggcagcggtatgtttgcgaaatattcaagtctggaaaaccattacaataataagttcattgagaagatccgtggtgcaggcttcgatatgcacaccgtggaatgggtagctcgcgagaagattcatggaacgaactttagcgttatcattactccgaccgaaattgtcccagccaaacgcacagggccgatcttggaaggcgagtcgttctttggttacgaaattatcatgaagaaatataaagactcctttgtgaagatgcagaacatgctgaatgccatggatcttgttagcgtgcaaatctttggcgaatttgcgggtggtggcattcagaaaggcgtcgattacggagacaaagatttctatgtgtttgacatcctgtctgatagcgggaacgagaaagtttactgggatgactatgtagtcgaatcgtttgcaaccggcctcggtttaaaattagcgcctctgctgggacgtggtagtttcgaggaactgtcccaatacgtgaacgatttcaaaagcattgtgaactattataatgaattggttgatacgacggacctggaacatgccaataaacacgtctttggtccgcaagcgtcttctgaaactggcgtagcagaaggctacgttcttaaacccgtcaacccgaaattctttaataatggtacacgcgtggcgattaaatgcaagaactccaaattttcggagaaagctaagagcgacaaaccaattaaagcgaaagtggaactgaccgagaacgataaacgtgtgctcgaaatctttagcgagtatgttacctggaatcgcgtcagtaacgtactgtcacatattggctcagtgaccgccaaagattttgggcgtgttatgggtctgacgatgaaagacatcattaatgaagcagcacgcgaaggccatgatatgttgttcgctgataacccgtcggcggtgaagaaagagctgaccattctcatccagaacacgattcgttccaaatggcacgaagttctggag

SEQ ID NO: 124 - protein, 346 aa, synthetic construct
  REGION 1..346: note = Engineered RNA ligase variants
MHHHHHHGGSGMFAKYSSLENHYNNKFIEKIRGAGFDMHTVEWVAREKIHGTNFSVIITPTEIVPAKRTGPILEGESFFGYEIIMKKYKDSFVKMQNMLNAMDLVSVQIFGEFAGGGIQKGVDYGDKDFYVFDILSDSGNEKVYWDDYVVESFATGLGLKLAPLLGRGSFEELSQYVNDFKSIVNYYNELVDTTDLEHANKHVFGPQASSETGVAEGYVLKPVNPKFFNNGTRVAIKCKNSKFSEKAKSDKPIKAKVELTENDKRVLEIFSEYVTWNRVSNVLSHIGSVTAKDFGRVMGLTMKDIINEAAREGHDMLFADNPSAVKKELTILIQNTIRSKWHEVLE

SEQ ID NO: 125 - DNA, 1038 bp, synthetic construct
  misc_feature 1..1038: note = Engineered RNA ligase variants
  source 1..1038: mol_type = other DNA
atgcatcaccatcaccatcacggtggcagcggtatgtttgcgaaatattcaagtctggaaaaccattacaataataagttcattgagaagatccgtggtgcaggcttcgatatgcacaccgtggaatgggtagctcgcgagaagattcatggaacgaactttagcgttatcattactccgaccgaaatcgtcccagccaaacgcacagggccgatcttggaaggcgagtcgttctttggtcacgaaattatcatgaagaaatataaagactccttcgtgaagatgcagaacatgctgaatgccatggatcttgttagcgtgcaaatctttggcgaatttgcgggtggtggcattcagaaaggcgtcgattacggagacaaagatttctatgtgtttgacatcctgtctgatagcgggaacgagaaagtttactgggatgactatgtagtcgaatcgtttgcaaccggcctcggtttaaaattagcgcctctgctgggacgtggtagtttcgctgaactgtcccagtacgtgaacgatttcaaaagcattgtgaactattataatgaattggttgatacgacggacctggaacatgccaataaacacgtctttggtccgcaagcgtcttctgaaactggcgtagcagaaggctacgttcttaaacccgtcaacccgaaattctttaataatggtacacgcgtggcgattaaatgcaagaactccaaattttcggagaaagctaagagcgacaaaccaattaaagcgaaagtggaactgaccgagaacgataaacgtgtgctcgaaatctttagcgagtatgttacctggaatcgcgtcaacaacgtactgtcacatattggctcagtgaccgccaaagattttgggcgtgttatgggtctgacgatgaaagacatcattaatgaagcagcacgcgaaggccatgatctgttgttcgctgataacccgtcggcggtgaagaaagagctgaccattctcatccaggacacgattcgttcgaaatggcacgaagttctggag

SEQ ID NO: 126 - protein, 346 aa, synthetic construct
  REGION 1..346: note = Engineered RNA ligase variants
MHHHHHHGGSGMFAKYSSLENHYNNKFIEKIRGAGFDMHTVEWVAREKIHGTNFSVIITPTEIVPAKRTGPILEGESFFGHEIIMKKYKDSFVKMQNMLNAMDLVSVQIFGEFAGGGIQKGVDYGDKDFYVFDILSDSGNEKVYWDDYVVESFATGLGLKLAPLLGRGSFAELSQYVNDFKSIVNYYNELVDTTDLEHANKHVFGPQASSETGVAEGYVLKPVNPKFFNNGTRVAIKCKNSKFSEKAKSDKPIKAKVELTENDKRVLEIFSEYVTWNRVNNVLSHIGSVTAKDFGRVMGLTMKDIINEAAREGHDLLFADNPSAVKKELTILIQDTIRSKWHEVLE

SEQ ID NO: 127 - DNA, 1038 bp, synthetic construct; identical to SEQ ID NO: 41
  misc_feature 1..1038: note = Engineered RNA ligase variants
  source 1..1038: mol_type = other DNA

SEQ ID NO: 128 - protein, 346 aa, synthetic construct; identical to SEQ ID NO: 42
  REGION 1..346: note = Engineered RNA ligase variants

SEQ ID NO: 129 - DNA, 1038 bp, synthetic construct
  misc_feature 1..1038: note = Engineered RNA ligase variants
  source 1..1038: mol_type = other DNA
atgcatcaccatcaccatcacggtggcagcggtatgtttgcgatgtattcaagtctggaaaaccattacaataataagttcattgagaagatccgtggggcaggcttcgatatgcacaccgtggaatgggtagctcgcgagaagattcatggaacgaactttagcgttatcattactccgaccgaaatcgtcccagccaaacgcacagggccgatcttggaaggcgagtcgttctttggtcacgaaattatcatgaagaaatataaagactccttcgtgaaggtgcagaacatgctgaatgccatggatcttgttagcgtgcaaatctttggcgaatttgcgggtggtggcattcagaaaggcgtcgattacggagacaaagatttctatgtgtttgacatcctgtctgatagcgggaacgagaaagtttactgggatgactatcgcgtcgaatcgttttgcaccacgctcggtctgaaattagcgcctctgctgggacgtggtagtttcgctgaactgtcccagtacccaaacgatttcaaaagcattgtgaaccgttataatgaattggttgatacgacgggcctggaacatgccaataaacacgtctttggtccgcaagcgtcttctgaaactggcgtagcagaaggctacgttcttaaacccgtcaacccgaaattctttaataatggtacacgcgtggcgattaaatgcaagaactccaaattttcggagaaagccaagagcgacaaaccaattaaagcgaaagtggaactgacggagaacgataaacgtgtgctcgaaatctttagcgagtatgttacctggaatcgcgtcagtaacgtactgtcacatattggctcagtgaccgcaaaagattttgggcgtgttatgggtctgacgatgaaagacatcattaatgaagcagcacgcgaaggccatgatatgctgttcgctgataacccgtcggcggtgaagaaagagctgacccgcctcatccagaacacgattcgttccaaatggcacgaagttctggag

SEQ ID NO: 130 - protein, 346 aa, synthetic construct
  REGION 1..346: note = Engineered RNA ligase variants
MHHHHHHGGSGMFAMYSSLENHYNNKFIEKIRGAGFDMHTVEWVAREKIHGTNFSVIITPTEIVPAKRTGPILEGESFFGHEIIMKKYKDSFVKVQNMLNAMDLVSVQIFGEFAGGGIQKGVDYGDKDFYVFDILSDSGNEKVYWDDYRVESFCTTLGLKLAPLLGRGSFAELSQYPNDFKSIVNRYNELVDTTGLEHANKHVFGPQASSETGVAEGYVLKPVNPKFFNNGTRVAIKCKNSKFSEKAKSDKPIKAKVELTENDKRVLEIFSEYVTWNRVSNVLSHIGSVTAKDFGRVMGLTMKDIINEAAREGHDMLFADNPSAVKKELTRLIQNTIRSKWHEVLE

SEQ ID NO: 131 - DNA, 1038 bp, synthetic construct
  misc_feature 1..1038: note = Engineered RNA ligase variants
  source 1..1038: mol_type = other DNA
atgcatcaccatcaccatcacggtggcagcggtatgtttgcgaaatattcaagtctggaaaaccattacaataataagttcattgagaagatccgtggggcaggcttcgatatgcacaccgtggaatgggtagctcgcgagaagattcatggaacgaactttagcgttatcattactccgaccgaaatcgtcccagccaaacgcacagggccgatcttggaaggcgagtcgttctttggtcacgaaattatcatgaagaaatataaagactccttcgtgaaggtgcagaacatgctgaatgccatggatcttgttagcgtgcaaatctttggcgaatttgcgggtggtggcattcagaaaggcgtcgattacggagacaaagatttctatgtgtttgacatcctgtctgatagcgggaacgagaaagtttactgggatgactatcgcgtcgaatcgttttgcaccgggctcggtctgaaattagcgcctctgctgggacgtggtagtttcgctgaactgtcccagtacccaaacgatttcaaaagcattgtgaacgactataatgaattggttgatacgacgggcctggaacatgccaataaacacgtctttggtccgcaagcgtcttctgaaactggcgtagcagaaggctacgttcttaaacccgtctatccgaagttctttaataatggtacacgcgtggcgattaaatgcaagaactccaaattttcggagaaagccaagagcgacaaaccaattaaagcgaaagtggaactgacggagaacgataaacgtgtgctcgaaatctttagcgagtatgttacctggaatcgcgtcagtaacgtactgtcacatattggctcagtgaccgcaaaagattttgggcgtgttatgggtctgacgatgaaagacatcattaatgaagcagcacgcgaaggccatgatatggctttcgctgataacccgtcggcggtgaagaaagagctgacccgcctcatccagaacacgattcgttccaaatggcacgaagttctggag

SEQ ID NO: 132 - protein, 346 aa, synthetic construct
  REGION 1..346: note = Engineered RNA ligase variants
MHHHHHHGGSGMFAKYSSLENHYNNKFIEKIRGAGFDMHTVEWVAREKIHGTNFSVIITPTEIVPAKRTGPILEGESFFGHEIIMKKYKDSFVKVQNMLNAMDLVSVQIFGEFAGGGIQKGVDYGDKDFYVFDILSDSGNEKVYWDDYRVESFCTGLGLKLAPLLGRGSFAELSQYPNDFKSIVNDYNELVDTTGLEHANKHVFGPQASSETGVAEGYVLKPVYPKFFNNGTRVAIKCKNSKFSEKAKSDKPIKAKVELTENDKRVLEIFSEYVTWNRVSNVLSHIGSVTAKDFGRVMGLTMKDIINEAAREGHDMAFADNPSAVKKELTRLIQNTIRSKWHEVLE

SEQ ID NO: 133 - DNA, 1038 bp, synthetic construct
  misc_feature 1..1038: note = Engineered RNA ligase variants
  source 1..1038: mol_type = other DNA
atgcatcaccatcaccatcacggtggcagcggtatgtttgcgatgtattcaagtctggaaaaccattacaataataagttcattgagaagatccgtctggcaggcttcgatatgcacaccgtggaatgggtagctcgcgagaagattcatggaacgaactttagcgttatcattactccgaccgaaatcgtcccagccaaacgcacagggccgatcttggaaggcgagtcgttctttggtcacgaaattatcatgaaaaaatataaagactccttcgtgaaggtgcagaacatgctgaatgccatggatcttgttagcgtgcaaatctttggcgaatttgcgggtggtggcattcagaaaggcgtcgattacggagacaaagatttctatgtgtttgacatcctgtctgatagcgggaacgagaaagtttactgggatgactatactgtcgaatcgttttgcaccgggctcggtctgaaattagcgcctctgctgggacgtggtagtttcgctgaactgtcccagtacccaaacgatttcaaaagcattgtgaaccgttataatgaattggttgatacgacgggcctggaacatgccaataaacacgtctttggtccgcaagcgtcttctgaaactggcgtagcagaaggctacgttcttaaacccgtcaacccgaaattctttaataatggtacacgcgtggcgattaaatgcaagaactccaaattttcggagaaagccaagagcgacaaaccaattaaagcgaaagtggaactgacggagaacgataaacgtgtgctcgaaatctttagcgagtatgttacctggaatcgcgtcagtaacgtactgtcacatattggctcagtgaccgcaaaagattttgggcgtgttatgggtctgacgatgaaagacatcattaatgaagcagcacgcgaaggccatgatatgctgttcgctgataacccgtcggcggtgaagaaagagctgaccattctcatccagaacacgattcgttccaaatggcacgaagttctggag

SEQ ID NO: 134 - protein, 346 aa, synthetic construct
  REGION 1..346: note = Engineered RNA ligase variants
MHHHHHHGGSGMFAMYSSLENHYNNKFIEKIRLAGFDMHTVEWVAREKIHGTNFSVIITPTEIVPAKRTGPILEGESFFGHEIIMKKYKDSFVKVQNMLNAMDLVSVQIFGEFAGGGIQKGVDYGDKDFYVFDILSDSGNEKVYWDDYTVESFCTGLGLKLAPLLGRGSFAELSQYPNDFKSIVNRYNELVDTTGLEHANKHVFGPQASSETGVAEGYVLKPVNPKFFNNGTRVAIKCKNSKFSEKAKSDKPIKAKVELTENDKRVLEIFSEYVTWNRVSNVLSHIGSVTAKDFGRVMGLTMKDIINEAAREGHDMLFADNPSAVKKELTILIQNTIRSKWHEVLE

SEQ ID NO: 135 - DNA, 1038 bp, synthetic construct
  misc_feature 1..1038: note = Engineered RNA ligase variants
  source 1..1038: mol_type = other DNA
atgcatcaccatcaccatcacggtggcagcggtatgtttgcgaaatattcaagtctggaaaaccattacaataataagttcattgagaagatccgtggggcaggcttcgatatgcacaccgtggaatgggtagctcgcgagaagattcatggaacgaactttagcgttatcattactccgaccgaaatcgtcccagccaaacgcacagggccgatcttggaaggcgagtcgttctttggtcacgaaattatcatgaagaaatataaagactccttcgtgaaggtgcagaacatgctgaatgccatggatcttgttagcgtgcaaatctttggcgaatttgcgggtggtggcattcagaaaggcgtcgattacggagacaaagatttctatgtgtttgacatcctgtctgatagcgggaacgagaaagtttactgggatgactatcgcgtcgaatcgtttgcgaccacgctcggtctgaaattagcgcctctgctgggacgtggtagtttcgctgaactgtcccagtacccaaacgatttcaaaagcattgtgaaccgttataatgaattggttgatacgacgggcctggaacatgccaataaacacgtctttggtccgcaagcgtcttctgaaactggcgtagcagaaggctacgttcttaaacccgtctatccgatcttctttaataatggtacacgcgtggcgattaaatgcaagaactccaaattttcggagaaagccaagagcgacaaaccaattaaagcgaaagtggaactgacggagaacgataaacgtgtgctcgaaatctttagcgagtatgttacctggaatcgcgtcagtaacgtactgtcacatattggctcagtgaccgcaaaagattttgggcgtgttatgggtctgacgatgaaagacatcattaatgaagcagcacgcgaaggccatgatatggctttcgctgataacccgtcggcggtgaagaaagagctgaccattctcatccagaacacgattcgttccaaatggcacgaagttctggag

SEQ ID NO: 136 - protein, 346 aa, synthetic construct
  REGION 1..346: note = Engineered RNA ligase variants
MHHHHHHGGSGMFAKYSSLENHYNNKFIEKIRGAGFDMHTVEWVAREKIHGTNFSVIITPTEIVPAKRTGPILEGESFFGHEIIMKKYKDSFVKVQNMLNAMDLVSVQIFGEFAGGGIQKGVDYGDKDFYVFDILSDSGNEKVYWDDYRVESFATTLGLKLAPLLGRGSFAELSQYPNDFKSIVNRYNELVDTTGLEHANKHVFGPQASSETGVAEGYVLKPVYPIFFNNGTRVAIKCKNSKFSEKAKSDKPIKAKVELTENDKRVLEIFSEYVTWNRVSNVLSHIGSVTAKDFGRVMGLTMKDIINEAAREGHDMAFADNPSAVKKELTILIQNTIRSKWHEVLE

SEQ ID NO: 137 - DNA, 1038 bp, synthetic construct
  misc_feature 1..1038: note = Engineered RNA ligase variants
  source 1..1038: mol_type = other DNA
atgcatcaccatcaccatcacggtggcagcggtatgtttgcgtattattcaagtctggaaaaccattacaataataagttcattgagaagatccgtggtgcaggcttcgatatgcacaccgtggaatgggtagctcgcgagaagattcatggaacgaactttagcgttatcattactccgaccgaaatcgtcccagccaaacgcacagggccgatcttggaaggcgagtcgttctttggtcacgaaattatcatgaagaaatataaagactccttcgtgaaggtgcagaacatgctgaatgccatggatcttgttagcgtgcaaatctttggcgaatttgcgggtggtggcattcagaaaggcgtcgattacggagacaaagatttctatgtgtttgacatcctgtctgatagcgggaacgagaaagtttactgggatgactatcgcgtcgaatcgtttgcgaccacgctcggtctgaaattagcgcctctgctgggacgtggtagtttcgctgaactgtcccagtacccaaacgatttcaaaagcattgtgaactattataatgaattggttgatacgacgggcctggaacatgccaataaacacgtctttggtccgcaagcgtcttctgaaactggcgtagcagaaggctacgttcttaaacccgtctatccgatcttctttaataatggtacacgcgtggcgattaaatgcaagaactccaaattttcggagaaagccaagagcgacaaaccaattaaagcgaaagtggaactgacggagaacgataaacgtgtgctcgaaatctttagcgagtatgttacctggaatcgcgtcagtaacgtactgtcacatattggctcagtgaccgcaaaagattttgggcgtgttatgggtctgacgatgaaagacatcattaatgaagcagcacgcgaaggccatgatatgctgttcgctgataacccgtcggcggtgaagaaagagctgaccattctcatccagaacacgattcgttccaaatggcacgaagttctggag

SEQ ID NO: 138 - protein, 346 aa, synthetic construct
  REGION 1..346: note = Engineered RNA ligase variants
MHHHHHHGGSGMFAYYSSLENHYNNKFIEKIRGAGFDMHTVEWVAREKIHGTNFSVIITPTEIVPAKRTGPILEGESFFGHEIIMKKYKDSFVKVQNMLNAMDLVSVQIFGEFAGGGIQKGVDYGDKDFYVFDILSDSGNEKVYWDDYRVESFATTLGLKLAPLLGRGSFAELSQYPNDFKSIVNYYNELVDTTGLEHANKHVFGPQASSETGVAEGYVLKPVYPIFFNNGTRVAIKCKNSKFSEKAKSDKPIKAKVELTENDKRVLEIFSEYVTWNRVSNVLSHIGSVTAKDFGRVMGLTMKDIINEAAREGHDMLFADNPSAVKKELTILIQNTIRSKWHEVLE

SEQ ID NO: 139 - DNA, 1038 bp, synthetic construct
  misc_feature 1..1038: note = Engineered RNA ligase variants
  source 1..1038: mol_type = other DNA
atgcatcaccatcaccatcacggtggcagcggtatgtttgcgtattattcaagtctggaaaaccattacaataataagttcattgagaagatccgtctggcaggcttcgatatgcacaccgtggaatgggtagctcgcgagaagattcatggaacgaactttagcgttatcattactccgaccgaaatcgtcccagccaaacgcacagggccgatcttggaaggcgagtcgttctttggtcacgaaattatcatgggcaaatataaagactccttcgtgaaggtgcagaacatgctgaatgccatggatcttgttagcgtgcaaatctttggcgaatttgcgggtggtggcattcagaaaggcgtcgattacggagacaaagatttctatgtgtttgacatcctgtctgatagcgggaacgagaaagtttactgggatgactatactgtcgaatcgttttgcaccacgctcggtctgaaattagcgcctctgctgggacgtggtagtttcgctgaactgtcccagtacccaaacgatttcaaaagcattgtgaaccgttataatgaattggttgatacgacgggcctggaacatgccaataaacacgtctttggtccgcaagcgtcttctgaaactggcgtagcagaaggctacgttcttaaacccgtcaatccgatcttctttaataatggtacacgcgtggcgattaaatgcaagaactccaaattttcggagaaagccaagagcgacaaaccaattaaagcgaaagtggaactgacggagaacgataaacgtgtgctcgaaatctttagcgagtatgttacctggaatcgcgtcagtaacgtactgtcacatattggctcagtgaccgcaaaagattttgggcgtgttatgggtctgacgatgaaagacatcattaatgaagcagcacgcgaaggccatgatatgctgttcgctgataacccgtcggcggtgaagaaagagctgacctggctcatccagaacacgattcgttccaaatggcacgaagttctggag

SEQ ID NO: 140 - protein, 346 aa, synthetic construct
  REGION 1..346: note = Engineered RNA ligase variants
MHHHHHHGGSGMFAYYSSLENHYNNKFIEKIRLAGFDMHTVEWVAREKIHGTNFSVIITPTEIVPAKRTGPILEGESFFGHEIIMGKYKDSFVKVQNMLNAMDLVSVQIFGEFAGGGIQKGVDYGDKDFYVFDILSDSGNEKVYWDDYTVESFCTTLGLKLAPLLGRGSFAELSQYPNDFKSIVNRYNELVDTTGLEHANKHVFGPQASSETGVAEGYVLKPVNPIFFNNGTRVAIKCKNSKFSEKAKSDKPIKAKVELTENDKRVLEIFSEYVTWNRVSNVLSHIGSVTAKDFGRVMGLTMKDIINEAAREGHDMLFADNPSAVKKELTWLIQNTIRSKWHEVLE

SEQ ID NO: 141 - DNA, 1038 bp, synthetic construct
  misc_feature 1..1038: note = Engineered RNA ligase variants
  source 1..1038: mol_type = other DNA
atgcatcaccatcaccatcacggtggcagcggtatgtttgcgtattattcaagtctggaaaaccattacaataataagttcattgagaagatccgtggggcaggcttcgatatgcacaccgtggaatgggtagctcgcgagaagattcatggaacgaactttagcgttatcattactccgaccgaaatcgtcccagccaaacgcacagggccgatcttggaaggcgagtcgttctttggtcacgaaattatcatgaagaaatataaagactccttcgtgaaggtgcagaacatgctgaatgccatggatcttgttagcgtgcaaatctttggcgaatttgcgggtggtggcattcagaaaggcgtcgattacggagacaaagatttctatgtgtttgacatcctgtctgatagcgggaacgagaaagtttactgggatgactatcgcgtcgaatcgtttgcgaccacgctcggtctgaaattagcgcctctgctgggacgtggtagtttcgctgaactgtcccagtacccaaacgatttcaaaagcattgtgaaccgttataatgaattggttgatacgacgggcctggaacatgccaataaacacgtctttggtccgcaagcgtcttctgaaactggcgtagcagaaggctacgttcttaaacccgtctatccgaagttctttaataatggtacacgcgtggcgattaaatgcaagaactccaaattttcggagaaagccaagagcgacaaaccaattaaagcgaaagtggaactgacggagaacgataaacgtgtgctcgaaatctttagcgagtatgttacctggaatcgcgtcagtaacgtactgtcacatattggctcagtgaccgcaaaagattttgggcgtgttatgggtctgacgatgaaagacatcattaatgaagcagcacgcgaaggccatgatatggctttcgctgataacccgtcggcggtgaagaaagagctgacctggctcatccagaacacgattcgttccaaatggcacgaagttctggag

SEQ ID NO: 142 - protein, 346 aa, synthetic construct
  REGION 1..346: note = Engineered RNA ligase variants
MHHHHHHGGSGMFAYYSSLENHYNNKFIEKIRGAGFDMHTVEWVAREKIHGTNFSVIITPTEIVPAKRTGPILEGESFFGHEIIMKKYKDSFVKVQNMLNAMDLVSVQIFGEFAGGGIQKGVDYGDKDFYVFDILSDSGNEKVYWDDYRVESFATTLGLKLAPLLGRGSFAELSQYPNDFKSIVNRYNELVDTTGLEHANKHVFGPQASSETGVAEGYVLKPVYPKFFNNGTRVAIKCKNSKFSEKAKSDKPIKAKVELTENDKRVLEIFSEYVTWNRVSNVLSHIGSVTAKDFGRVMGLTMKDIINEAAREGHDMAFADNPSAVKKELTWLIQNTIRSKWHEVLE

SEQ ID NO: 143 - DNA, 1038 bp, synthetic construct
  misc_feature 1..1038: note = Engineered RNA ligase variants
  source 1..1038: mol_type = other DNA
atgcatcaccatcaccatcacggtggcagcggtatgtttgcgatgtattcaagtctggaaaaccattacaataataagttcattgagaagatccgtctggcaggcttcgatatgcacaccgtggaatgggtagctcgcgagaagattcatggaacgaactttagcgttatcattactccgaccgaaatcgtcccagccaaacgcacagggccgatcttggaaggcgagtcgttctttggtcacgaaattatcatgaaaaaatataaagactccttcgtgaaggtgcagaacatgctgaatgccatggatcttgttagcgtgcaaatctttggcgaatttgcgggtggtggcattcagaaaggcgtcgattacggagacaaagatttctatgtgtttgacatcctgtctgatagcgggaacgagaaagtttactgggatgactatactgtcgaatcgttttgcaccgggctcggtctgaaattagcgcctctgctgggacgtggtagtttcgctgaactgtcccagtacccaaacgatttcaaaagcattgtgaactattataatgaattggttgatacgacgggcctggaacatgccaataaacacgtctttggtccgcaagcgtcttctgaaactggcgtagcagaaggctacgttcttaaacccgtcaacccgaaattctttaataatggtacacgcgtggcgattaaatgcaagaactccaaattttcggagaaagccaagagcgacaaaccaattaaagcgaaagtggaactgacggagaacgataaacgtgtgctcgaaatctttagcgagtatgttacctggaatcgcgtcagtaacgtactgtcacatattggctcagtgaccgcaaaagattttgggcgtgttatgggtctgacgatgaaagacatcattaatgaagcagcacgcgaaggccatgatatggctttcgctgataacccgtcggcggtgaagaaagagctgaccattctcatccagaacacgattcgttccaaatggcacgaagttctggag

SEQ ID NO: 144 - protein, 346 aa, synthetic construct
  REGION 1..346: note = Engineered RNA ligase variants
MHHHHHHGGSGMFAMYSSLENHYNNKFIEKIRLAGFDMHTVEWVAREKIHGTNFSVIITPTEIVPAKRTGPILEGESFFGHEIIMKKYKDSFVKVQNMLNAMDLVSVQIFGEFAGGGIQKGVDYGDKDFYVFDILSDSGNEKVYWDDYTVESFCTGLGLKLAPLLGRGSFAELSQYPNDFKSIVNYYNELVDTTGLEHANKHVFGPQASSETGVAEGYVLKPVNPKFFNNGTRVAIKCKNSKFSEKAKSDKPIKAKVELTENDKRVLEIFSEYVTWNRVSNVLSHIGSVTAKDFGRVMGLTMKDIINEAAREGHDMAFADNPSAVKKELTILIQNTIRSKWHEVLE

SEQ ID NO: 145 - DNA, 1038 bp, synthetic construct
  misc_feature 1..1038: note = Engineered RNA ligase variants
  source 1..1038: mol_type = other DNA
atgcatcaccatcaccatcacggtggcagcggtatgtttgcgatgtattcaagtctggaaaaccattacaataataagttcattgagaagatccgtggggcaggcttcgatatgcacaccgtggaatgggtagctcgcgagaagattcatggaacgaactttagcgttatcattactccgaccgaaatcgtcccagccaaacgcacagggccgatcttggaaggcgagtcgttctttggtcacgaaattatcatgaagaaatataaagactccttcgtgaaggtgcagaacatgctgaatgccatggatcttgttagcgtgcaaatctttggcgaatttgcgggtggtggcattcagaaaggcgtcgattacggagacaaagatttctatgtgtttgacatcctgtctgatagcgggaacgagaaagtttactgggatgactatcgcgtcgaatcgttttgcaccgggctcggtctgaaattagcgcctctgctgggacgtggtagtttcgctgaactgtcccagtacccaaacgatttcaaaagcattgtgaactactataatgaattggttgatacgacgggcctggaacatgccaataaacacgtctttggtccgcaagcgtcttctgaaactggcgtagcagaaggctacgttcttaaacccgtctatccgaagttctttaataatggtacacgcgtggcgattaaatgcaagaactccaaattttcggagaaagccaagagcgacaaaccaattaaagcgaaagtggaactgacggagaacgataaacgtgtgctcgaaatctttagcgagtatgttacctggaatcgcgtcagtaacgtactgtcacatattggctcagtgaccgcaaaagattttgggcgtgttatgggtctgacgatgaaagacatcattaatgaagcagcacgcgaaggccatgatatggctttcgctgataacccgtcggcggtgaagaaagagctgaccattctcatccagaacacgattcgttccaaatggcacgaagttctggag

SEQ ID NO: 146 - protein, 346 aa, synthetic construct
  REGION 1..346: note = Engineered RNA ligase variants
MHHHHHHGGSGMFAMYSSLENHYNNKFIEKIRGAGFDMHTVEWVAREKIHGTNFSVIITPTEIVPAKRTGPILEGESFFGHEIIMKKYKDSFVKVQNMLNAMDLVSVQIFGEFAGGGIQKGVDYGDKDFYVFDILSDSGNEKVYWDDYRVESFCTGLGLKLAPLLGRGSFAELSQYPNDFKSIVNYYNELVDTTGLEHANKHVFGPQASSETGVAEGYVLKPVYPKFFNNGTRVAIKCKNSKFSEKAKSDKPIKAKVELTENDKRVLEIFSEYVTWNRVSNVLSHIGSVTAKDFGRVMGLTMKDIINEAAREGHDMAFADNPSAVKKELTILIQNTIRSKWHEVLE

SEQ ID NO: 147 - DNA, 1038 bp, synthetic construct
  misc_feature 1..1038: note = Engineered RNA ligase variants
  source 1..1038: mol_type = other DNA
atgcatcaccatcaccatcacggtggcagcggtatgtttgcgtattattcaagtctggaaaaccattacaataataagttcattgagaagatccgtggggcaggcttcgatatgcacaccgtggaatgggtagctcgcgagaagattcatggaacgaactttagcgttatcattactccgaccgaaatcgtcccagccaaacgcacagggccgatcttggaaggcgagtcgttctttggtcacgaaattatcatgaaaaaatataaagactccttcgtgaaggtgcagaacatgctgaatgccatggatcttgttagcgtgcaaatctttggcgaatttgcgggtggtggcattcagaaaggcgtcgattacggagacaaagatttctatgtgtttgacatcctgtctgatagcgggaacgagaaagtttactgggatgactatcgcgtcgaatcgtttgcgaccacgctcggtctgaaattagcgcctctgctgggacgtggtagtttcgctgaactgtcccagtacccaaacgatttcaaaagcattgtgaacgactataatgaattggttgatacgacggacctggaacatgccaataaacacgtctttggtccgcaagcgtcttctgaaactggcgtagcagaaggctacgttcttaaacccgtctatccgatcttctttaataatggtacacgcgtggcgattaaatgcaagaactccaaattttcggagaaagccaagagcgacaaaccaattaaagcgaaagtggaactgacggagaacgataaacgtgtgctcgaaatctttagcgagtatgttacctggaatcgcgtcagtaacgtactgtcacatattggctcagtgaccgcaaaagattttgggcgtgttatgggtctgacgatgaaagacatcattaatgaagcagcacgcgaaggccatgatatggctttcgctgataacccgtcggcggtgaagaaagagctgacccgcctcatccagaacacgattcgttccaaatggcacgaagttctggag

SEQ ID NO: 148 - protein, 346 aa, synthetic construct
  REGION 1..346: note = Engineered RNA ligase variants
MHHHHHHGGSGMFAYYSSLENHYNNKFIEKIRGAGFDMHTVEWVAREKIHGTNFSVIITPTEIVPAKRTGPILEGESFFGHEIIMKKYKDSFVKVQNMLNAMDLVSVQIFGEFAGGGIQKGVDYGDKDFYVFDILSDSGNEKVYWDDYRVESFATTLGLKLAPLLGRGSFAELSQYPNDFKSIVNDYNELVDTTDLEHANKHVFGPQASSETGVAEGYVLKPVYPIFFNNGTRVAIKCKNSKFSEKAKSDKPIKAKVELTENDKRVLEIFSEYVTWNRVSNVLSHIGSVTAKDFGRVMGLTMKDIINEAAREGHDMAFADNPSAVKKELTRLIQNTIRSKWHEVLE

SEQ ID NO: 149 - DNA, 1038 bp, synthetic construct
  misc_feature 1..1038: note = Engineered RNA ligase variants
  source 1..1038: mol_type = other DNA
atgcatcaccatcaccatcacggtggcagcggtatgtttgcgatgtattcaagtctggaaaaccattacaataataagttcattgagaagatccgtggtgcaggcttcgatatgcacaccgtggaatgggtagctcgcgagaagattcatggaacgaactttagcgttatcattactccgaccgaaatcgtcccagccaaacgcacagggccgatcttggaaggcgagtcgttctttggtcacgaaattatcatgaaaaaatataaagactccttcgtgaaggtgcagaacatgctgaatgccatggatcttgttagcgtgcaaatctttggcgaatttgcgggtggtggcattcagaaaggcgtcgattacggagacaaagatttctatgtgtttgacatcctgtctgatagcgggaacgagaaagtttactgggatgactatactgtcgaatcgttttgcaccacgctcggtctgaaattagcgcctctgctgggacgtggtagtttcgctgaactgtcccagtacccaaacgatttcaaaagcattgtgaacgactataatgaattggttgatacgacgggcctggaacatgccaataaacacgtctttggtccgcaagcgtcttctgaaactggcgtagcagaaggctacgttcttaaacccgtcaatccgaagttctttaataatggtacacgcgtggcgattaaatgcaagaactccaaattttcggagaaagccaagagcgacaaaccaattaaagcgaaagtggaactgacggagaacgataaacgtgtgctcgaaatctttagcgagtatgttacctggaatcgcgtcagtaacgtactgtcacatattggctcagtgaccgcaaaagattttgggcgtgttatgggtctgacgatgaaagacatcattaatgaagcagcacgcgaaggccatgatatgttgttcgctgataacccgtcggcggtgaagaaagagctgaccctgctcatccagaacacgattcgttccaaatggcacgaagttctggag

SEQ ID NO: 150 - protein, 346 aa, synthetic construct
  REGION 1..346: note = Engineered RNA ligase variants
MHHHHHHGGSGMFAMYSSLENHYNNKFIEKIRGAGFDMHTVEWVAREKIHGTNFSVIITPTEIVPAKRTGPILEGESFFGHEIIMKKYKDSFVKVQNMLNAMDLVSVQIFGEFAGGGIQKGVDYGDKDFYVFDILSDSGNEKVYWDDYTVESFCTTLGLKLAPLLGRGSFAELSQYPNDFKSIVNDYNELVDTTGLEHANKHVFGPQASSETGVAEGYVLKPVNPKFFNNGTRVAIKCKNSKFSEKAKSDKPIKAKVELTENDKRVLEIFSEYVTWNRVSNVLSHIGSVTAKDFGRVMGLTMKDIINEAAREGHDMLFADNPSAVKKELTLLIQNTIRSKWHEVLE

SEQ ID NO: 151 - DNA, 1038 bp, synthetic construct
  misc_feature 1..1038: note = Engineered RNA ligase variants
  source 1..1038: mol_type = other DNA
atgcatcaccatcaccatcacggtggcagcggtatgtttgcgtattattcaagtctggaaaaccattacaataataagttcattgagaagatccgtctggcaggcttcgatatgcacaccgtggaatgggtagctcgcgagaagattcatggaacgaactttagcgttatcattactccgaccgaaatcgtcccagccaaacgcacagggccgatcttggaaggcgagtcgttctttggtcacgaaattatcatgaaaaaatataaagactccttcgtgaaggtgcagaacatgctgaatgccatggatcttgttagcgtgcaaatctttggcgaatttgcgggtggtggcattcagaaaggcgtcgattacggagacaaagatttctatgtgtttgacatcctgtctgatagcgggaacgagaaagtttactgggatgactatcgcgtcgaatcgttttgcaccacgctcggtctgaaattagcgcctctgctgggacgtggtagtttcgctgaactgtcccagtacccaaacgatttcaaaagcattgtgaaccgttataatgaattggttgatacgacgggcctggaacatgccaataaacacgtctttggtccgcaagcgtcttctgaaactggcgtagcagaaggctacgttcttaaacccgtctatccgatcttctttaataatggtacacgcgtggcgattaaatgcaagaactccaaattttcggagaaagccaagagcgacaaaccaattaaagcgaaagtggaactgacggagaacgataaacgtgtgctcgaaatctttagcgagtatgttacctggaatcgcgtcagtaacgtactgtcacatattggctcagtgaccgcaaaagattttgggcgtgttatgggtctgacgatgaaagacatcattaatgaagcagcacgcgaaggccatgatatggctttcgctgataacccgtcggcggtgaagaaagagctgacccgcctcatccagaacacgattcgttccaaatggcacgaagttctggag

SEQ ID NO: 152 - protein, 346 aa, synthetic construct
  REGION 1..346: note = Engineered RNA ligase variants
MHHHHHHGGSGMFAYYSSLENHYNNKFIEKIRLAGFDMHTVEWVAREKIHGTNFSVIITPTEIVPAKRTGPILEGESFFGHEIIMKKYKDSFVKVQNMLNAMDLVSVQIFGEFAGGGIQKGVDYGDKDFYVFDILSDSGNEKVYWDDYRVESFCTTLGLKLAPLLGRGSFAELSQYPNDFKSIVNRYNELVDTTGLEHANKHVFGPQASSETGVAEGYVLKPVYPIFFNNGTRVAIKCKNSKFSEKAKSDKPIKAKVELTENDKRVLEIFSEYVTWNRVSNVLSHIGSVTAKDFGRVMGLTMKDIINEAAREGHDMAFADNPSAVKKELTRLIQNTIRSKWHEVLE

SEQ ID NO: 153 - DNA, 1038 bp, synthetic construct
  misc_feature 1..1038: note = Engineered RNA ligase variants
  source 1..1038: mol_type = other DNA
atgcatcaccatcaccatcacggtggcagcggtatgtttgcgaaatattcaagtctggaaaaccattacaataataagttcattgagaagatccgtggggcaggcttcgatatgcacaccgtggaatgggtagctcgcgagaagattcatggaacgaactttagcgttatcattactccgaccgaaatcgtcccagccaaacgcacagggccgatcttggaaggcgagtcgttctttggtcacgaaattatcatgaagaaatataaagactccttcgtgaaggtgcagaacatgctgaatgccatggatcttgttagcgtgcaaatctttggcgaatttgcgggtggtggcattcagaaaggcgtcgattacggagacaaagatttctatgtgtttgacatcctgtctgatagcgggaacgagaaagtttactgggatgactatcgcgtcgaatcgtttgcgaccgggctcggtctgaaattagcgcctctgctgggacgtggtagtttcgctgaactgtcccagtacccaaacgatttcaaaagcattgtgaactactataatgaattggttgatacgacgggcctggaacatgccaataaacacgtctttggtccgcaagcgtcttctgaaactggcgtagcagaaggctacgttcttaaacccgtctatccgaagttctttaataatggtacacgcgtggcgattaaatgcaagaactccaaattttcggagaaagccaagagcgacaaaccaattaaagcgaaagtggaactgacggagaacgataaacgtgtgctcgaaatctttagcgagtatgttacctggaatcgcgtcagtaacgtactgtcacatattggctcagtgaccgcaaaagattttgggcgtgttatgggtctgacgatgaaagacatcattaatgaagcagcacgcgaaggccatgatatgttgttcgctgataacccgtcggcggtgaagaaagagctgaccattctcatccagaacacgattcgttccaaatggcacgaagttctggag

SEQ ID NO: 154 - protein, 346 aa, synthetic construct
  REGION 1..346: note = Engineered RNA ligase variants
MHHHHHHGGSGMFAKYSSLENHYNNKFIEKIRGAGFDMHTVEWVAREKIHGTNFSVIITPTEIVPAKRTGPILEGESFFGHEIIMKKYKDSFVKVQNMLNAMDLVSVQIFGEFAGGGIQKGVDYGDKDFYVFDILSDSGNEKVYWDDYRVESFATGLGLKLAPLLGRGSFAELSQYPNDFKSIVNYYNELVDTTGLEHANKHVFGPQASSETGVAEGYVLKPVYPKFFNNGTRVAIKCKNSKFSEKAKSDKPIKAKVELTENDKRVLEIFSEYVTWNRVSNVLSHIGSVTAKDFGRVMGLTMKDIINEAAREGHDMLFADNPSAVKKELTILIQNTIRSKWHEVLE

SEQ ID NO: 155 - DNA, 1038 bp, synthetic construct
  misc_feature 1..1038: note = Engineered RNA ligase variants
  source 1..1038: mol_type = other DNA
atgcatcaccatcaccatcacggtggcagcggtatgtttgcgaaatattcaagtctggaaaaccattacaataataagttcattgagaagatccgtggggcaggcttcgatatgcacaccgtggaatgggtagctcgcgagaagattcatggaacgaactttagcgttatcattactccgaccgaaatcgtcccagccaaacgcacagggccgatcttggaaggcgagtcgttctttggtcacgaaattatcatgggcaaatataaagactccttcgtgaaggtgcagaacatgctgaatgccatggatcttgttagcgtgcaaatctttggcgaatttgcgggtggtggcattcagaaaggcgtcgattacggagacaaagatttctatgtgtttgacatcctgtctgatagcgggaacgagaaagtttactgggatgactatactgtcgaatcgttttgcaccacgctcggtctgaaattagcgcctctgctgggacgtggtagtttcgctgaactgtcccagtacccaaacgatttcaaaagcattgtgaaccgttataatgaattggttgatacgacgggcctggaacatgccaataaacacgtctttggtccgcaagcgtcttctgaaactggcgtagcagaaggctacgttcttaaacccgtcaatccgaagttctttaataatggtacacgcgtggcgattaaatgcaagaactccaaattttcggagaaagccaagagcgacaaaccaattaaagcgaaagtggaactgacggagaacgataaacgtgtgctcgaaatctttagcgagtatgttacctggaatcgcgtcagtaacgtactgtcacatattggctcagtgaccgcaaaagattttgggcgtgttatgggtctgacgatgaaagacatcattaatgaagcagcacgcgaaggccatgatatgctgttcgctgataacccgtcggcggtgaagaaagagctgaccctgctcatccagaacacgattcgttccaaatggcacgaagttctggag

SEQ ID NO: 156 - protein, 346 aa, synthetic construct
  REGION 1..346: note = Engineered RNA ligase variants
MHHHHHHGGSGMFAKYSSLENHYNNKFIEKIRGAGFDMHTVEWVAREKIHGTNFSVIITPTEIVPAKRTGPILEGESFFGHEIIMGKYKDSFVKVQNMLNAMDLVSVQIFGEFAGGGIQKGVDYGDKDFYVFDILSDSGNEKVYWDDYTVESFCTTLGLKLAPLLGRGSFAELSQYPNDFKSIVNRYNELVDTTGLEHANKHVFGPQASSETGVAEGYVLKPVNPKFFNNGTRVAIKCKNSKFSEKAKSDKPIKAKVELTENDKRVLEIFSEYVTWNRVSNVLSHIGSVTAKDFGRVMGLTMKDIINEAAREGHDMLFADNPSAVKKELTLLIQNTIRSKWHEVLE

SEQ ID NO: 157 - DNA, 1038 bp, synthetic construct
  misc_feature 1..1038: note = Engineered RNA ligase variants
  source 1..1038: mol_type = other DNA
atgcatcaccatcaccatcacggtggcagcggtatgtttgcgccgtattcaagtctggaaaaccattacaataataagttcattgagaagatccgtctggcaggcttcgatatgcacaccgtggaatgggtagctcgcgagaagattcatggaacgaactttagcgttatcattactccgaccgaaatcgtcccagccaaacgcacagggccgatcttggaaggcgagtcgttctttggtcacgaaattatcatgaaaaaatataaagactccttcgtgaaggtgcagaacatgctgaatgccatggatcttgttagcgtgcaaatctttggcgaatttgcgggtggtggcattcagaaaggcgtcgattacggagacaaagatttctatgtgtttgacatcctgtctgatagcgggaacgagaaagtttactgggatgactatcgcgtcgaatcgtttgcgaccacgctcggtctgaaattagcgcctctgctgggacgtggtagtttcgctgaactgtcccagtacccaaacgatttcaaaagcattgtgaactactataatgaattggttgatacgacgggcctggaacatgccaataaacacgtctttggtccgcaagcgtcttctgaaactggcgtagcagaaggctacgttcttaaacccgtctatccgaagttctttaataatggtacacgcgtggcgattaaatgcaagaactccaaattttcggagaaagccaagagcgacaaaccaattaaagcgaaagtggaactgacggagaacgataaacgtgtgctcgaaatctttagcgagtatgttacctggaatcgcgtcagtaacgtactgtcacatattggctcagtgaccgcaaaagattttgggcgtgttatgggtctgacgatgaaagacatcattaatgaagcagcacgcgaaggccatgatatggctttcgctgataacccgtcggcggtgaagaaagagctgaccctgctcatccagaacacgattcgttccaaatggcacgaagttctggag

SEQ ID NO: 158 - protein, 346 aa, synthetic construct
  REGION 1..346: note = Engineered RNA ligase variants
MHHHHHHGGSGMFAPYSSLENHYNNKFIEKIRLAGFDMHTVEWVAREKIHGTNFSVIITPTEIVPAKRTGPILEGESFFGHEIIMKKYKDSFVKVQNMLNAMDLVSVQIFGEFAGGGIQKGVDYGDKDFYVFDILSDSGNEKVYWDDYRVESFATTLGLKLAPLLGRGSFAELSQYPNDFKSIVNYYNELVDTTGLEHANKHVFGPQASSETGVAEGYVLKPVYPKFFNNGTRVAIKCKNSKFSEKAKSDKPIKAKVELTENDKRVLEIFSEYVTWNRVSNVLSHIGSVTAKDFGRVMGLTMKDIINEAAREGHDMAFADNPSAVKKELTLLIQNTIRSKWHEVLE

SEQ ID NO: 159 - DNA, 1038 bp, synthetic construct
  misc_feature 1..1038: note = Engineered RNA ligase variants
  source 1..1038: mol_type = other DNA
atgcatcaccatcaccatcacggtggcagcggtatgtttgcgccgtattcaagtctggaaaaccattacaataataagttcattgagaagatccgtggggcaggcttcgatatgcacaccgtggaatgggtagctcgcgagaagattcatggaacgaactttagcgttatcattactccgaccgaaatcgtcccagccaaacgcacagggccgatcttggaaggcgagtcgttctttggtcacgaaattatcatgaagaaatataaagactccttcgtgaaggtgcagaacatgctgaatgccatggatcttgttagcgtgcaaatctttggcgaatttgcgggtggtggcattcagaaaggcgtcgattacggagacaaagatttctatgtgtttgacatcctgtctgatagcgggaacgagaaagtttactgggatgactatactgtcgaatcgttttgcaccacgctcggtctgaaattagcgcctctgctgggacgtggtagtttcgctgaactgtcccagtacccaaacgatttcaaaagcattgtgaacgactataatgaattggttgatacgacgggcctggaacatgccaataaacacgtctttggtccgcaagcgtcttctgaaactggcgtagcagaaggctacgttcttaaacccgtcaacccgaaattctttaataatggtacacgcgtggcgattaaatgcaagaactccaaattttcggagaaagccaagagcgacaaaccaattaaagcgaaagtggaactgacggagaacgataaacgtgtgctcgaaatctttagcgagtatgttacctggaatcgcgtcagtaacgtactgtcacatattggctcagtgaccgcaaaagattttgggcgtgttatgggtctgacgatgaaagacatcattaatgaagcagcacgcgaaggccatgatatggctttcgctgataacccgtcggcggtgaagaaagagctgaccctgctcatccagaacacgattcgttccaaatggcacgaagttctggag

SEQ ID NO: 160 - protein, 346 aa, synthetic construct
  REGION 1..346: note = Engineered RNA ligase variants
MHHHHHHGGSGMFAPYSSLENHYNNKFIEKIRGAGFDMHTVEWVAREKIHGTNFSVIITPTEIVPAKRTGPILEGESFFGHEIIMKKYKDSFVKVQNMLNAMDLVSVQIFGEFAGGGIQKGVDYGDKDFYVFDILSDSGNEKVYWDDYTVESFCTTLGLKLAPLLGRGSFAELSQYPNDFKSIVNDYNELVDTTGLEHANKHVFGPQASSETGVAEGYVLKPVNPKFFNNGTRVAIKCKNSKFSEKAKSDKPIKAKVELTENDKRVLEIFSEYVTWNRVSNVLSHIGSVTAKDFGRVMGLTMKDIINEAAREGHDMAFADNPSAVKKELTLLIQNTIRSKWHEVLE

SEQ ID NO: 161 - DNA, 1038 bp, synthetic construct
  misc_feature 1..1038: note = Engineered RNA ligase variants
  source 1..1038: mol_type = other DNA
atgcatcaccatcaccatcacggtggcagcggtatgtttgcgtattattcaagtctggaaaaccattacaataataagttcattgagaagatccgtctggcaggcttcgatatgcacaccgtggaatgggtagctcgcgagaagattcatggaacgaactttagcgttatcattactccgaccgaaatcgtcccagccaaacgcacagggccgatcttggaaggcgagtcgttctttggtcacgaaattatcatgaaaaaatataaagactccttcgtgaaggtgcagaacatgctgaatgccatggatcttgttagcgtgcaaatctttggcgaatttgcgggtggtggcattcagaaaggcgtcgattacggagacaaagatttctatgtgtttgacatcctgtctgatagcgggaacgagaaagtttactgggatgactatactgtcgaatcgttttgcaccacgctcggtctgaaattagcgcctctgctgggacgtggtagtttcgctgaactgtcccagtacccaaacgatttcaaaagcattgtgaacgactataatgaattggttgatacgacggacctggaacatgccaataaacacgtctttggtccgcaagcgtcttctgaaactggcgtagcagaaggctacgttcttaaacccgtctatccgaagttctttaataatggtacacgcgtggcgattaaatgcaagaactccaaattttcggagaaagccaagagcgacaaaccaattaaagcgaaagtggaactgacggagaacgataaacgtgtgctcgaaatctttagcgagtatgttacctggaatcgcgtcagtaacgtactgtcacatattggctcagtgaccgcaaaagattttgggcgtgttatgggtctgacgatgaaagacatcattaatgaagcagcacgcgaaggccatgatatgctgttcgctgataacccgtcggcggtgaagaaagagctgaccctgctcatccagaacacgattcgttccaaatggcacgaagttctggag

SEQ ID NO: 162 - protein, 346 aa, synthetic construct
  REGION 1..346: note = Engineered RNA ligase variants
MHHHHHHGGSGMFAYYSSLENHYNNKFIEKIRLAGFDMHTVEWVAREKIHGTNFSVIITPTEIVPAKRTGPILEGESFFGHEIIMKKYKDSFVKVQNMLNAMDLVSVQIFGEFAGGGIQKGVDYGDKDFYVFDILSDSGNEKVYWDDYTVESFCTTLGLKLAPLLGRGSFAELSQYPNDFKSIVNDYNELVDTTDLEHANKHVFGPQASSETGVAEGYVLKPVYPKFFNNGTRVAIKCKNSKFSEKAKSDKPIKAKVELTENDKRVLEIFSEYVTWNRVSNVLSHIGSVTAKDFGRVMGLTMKDIINEAAREGHDMLFADNPSAVKKELTLLIQNTIRSKWHEVLE

SEQ ID NO: 163 - DNA, 1038 bp, synthetic construct
  misc_feature 1..1038: note = Engineered RNA ligase variants
  source 1..1038: mol_type = other DNA
atgcatcaccatcaccatcacggtggcagcggtatgtttgcgccgtattcaagtctggaaaaccattacaataataagttcattgagaagatccgtggggcaggcttcgatatgcacaccgtggaatgggtagctcgcgagaagattcatggaacgaactttagcgttatcattactccgaccgaaatcgtcccagccaaacgcacagggccgatcttggaaggcgagtcgttctttggtcacgaaattatcatgaaaaaatataaagactccttcgtgaaggtgcagaacatgctgaatgccatggatcttgttagcgtgcaaatctttggcgaatttgcgggtggtggcattcagaaaggcgtcgattacggagacaaagatttctatgtgtttgacatcctgtctgatagcgggaacgagaaagtttactgggatgactatcgcgtcgaatcgtttgcgaccacgctcggtctgaaattagcgcctctgctgggacgtggtagtttcgctgaactgtcccagtacccaaacgatttcaaaagcattgtgaaccgttataatgaattggttgatacgacgggcctggaacatgccaataaacacgtctttggtccgcaagcgtcttctgaaactggcgtagcagaaggctacgttcttaaacccgtctatccgaagttctttaataatggtacacgcgtggcgattaaatgcaagaactccaaattttcggagaaagccaagagcgacaaaccaattaaagcgaaagtggaactgacggagaacgataaacgtgtgctcgaaatctttagcgagtatgttacctggaatcgcgtcagtaacgtactgtcacatattggctcagtgaccgcaaaagattttgggcgtgttatgggtctgacgatgaaagacatcattaatgaagcagcacgcgaaggccatgatatggctttcgctgataacccgtcggcggtgaagaaagagctgacctggctcatccagaacacgattcgttccaaatggcacgaagttctggag

SEQ ID NO: 164 - protein, 346 aa, synthetic construct
  REGION 1..346: note = Engineered RNA ligase variants
MHHHHHHGGSGMFAPYSSLENHYNNKFIEKIRGAGFDMHTVEWVAREKIHGTNFSVIITPTEIVPAKRTGPILEGESFFGHEIIMKKYKDSFVKVQNMLNAMDLVSVQIFGEFAGGGIQKGVDYGDKDFYVFDILSDSGNEKVYWDDYRVESFATTLGLKLAPLLGRGSFAELSQYPNDFKSIVNRYNELVDTTGLEHANKHVFGPQASSETGVAEGYVLKPVYPKFFNNGTRVAIKCKNSKFSEKAKSDKPIKAKVELTENDKRVLEIFSEYVTWNRVSNVLSHIGSVTAKDFGRVMGLTMKDIINEAAREGHDMAFADNPSAVKKELTWLIQNTIRSKWHEVLE

SEQ ID NO: 165 - DNA, 1038 bp, synthetic construct
  misc_feature 1..1038: note = Engineered RNA ligase variants
  source 1..1038: mol_type = other DNA
atgcatcaccatcaccatcacggtggcagcggtatgtttgcgtattattcaagtctggaaaaccattacaataataagttcattgagaagatccgtggggcaggcttcgatatgcacaccgtggaatgggtagctcgcgagaagattcatggaacgaactttagcgttatcattactccgaccgaaatcgtcccagccaaacgcacagggccgatcttggaaggcgagtcgttctttggtcacgaaattatcatgaagaaatataaagactccttcgtgaaggtgcagaacatgctgaatgccatggatcttgttagcgtgcaaatctttggcgaatttgcgggtggtggcattcagaaaggcgtcgattacggagacaaagatttctatgtgtttgacatcctgtctgatagcgggaacgagaaagtttactgggatgactatcgcgtcgaatcgttttgcaccacgctcggtctgaaattagcgcctctgctgggacgtggtagtttcgctgaactgtcccagtacccaaacgatttcaaaagcattgtgaactattataatgaattggttgatacgacgggcctggaacatgccaataaacacgtctttggtccgcaagcgtcttctgaaactggcgtagcagaaggctacgttcttaaacccgtctatccgaagttctttaataatggtacacgcgtggcgattaaatgcaagaactccaaattttcggagaaagccaagagcgacaaaccaattaaagcgaaagtggaactgacggagaacgataaacgtgtgctcgaaatctttagcgagtatgttacctggaatcgcgtcagtaacgtactgtcacatattggctcagtgaccgcaaaagattttgggcgtgttatgggtctgacgatgaaagacatcattaatgaagcagcacgcgaaggccatgatatgttgttcgctgataacccgtcggcggtgaagaaagagctgaccattctcatccagaacacgattcgttccaaatggcacgaagttctggag

SEQ ID NO: 166 - protein, 346 aa, synthetic construct
  REGION 1..346: note = Engineered RNA ligase variants
MHHHHHHGGSGMFAYYSSLENHYNNKFIEKIRGAGFDMHTVEWVAREKIHGTNFSVIITPTEIVPAKRTGPILEGESFFGHEIIMKKYKDSFVKVQNMLNAMDLVSVQIFGEFAGGGIQKGVDYGDKDFYVFDILSDSGNEKVYWDDYRVESFCTTLGLKLAPLLGRGSFAELSQYPNDFKSIVNYYNELVDTTGLEHANKHVFGPQASSETGVAEGYVLKPVYPKFFNNGTRVAIKCKNSKFSEKAKSDKPIKAKVELTENDKRVLEIFSEYVTWNRVSNVLSHIGSVTAKDFGRVMGLTMKDIINEAAREGHDMLFADNPSAVKKELTILIQNTIRSKWHEVLE

SEQ ID NO: 167 - DNA, 1038 bp, synthetic construct
  misc_feature 1..1038: note = Engineered RNA ligase variants
  source 1..1038: mol_type = other DNA
atgcatcaccatcaccatcacggtggcagcggtatgtttgcgatgtattcaagtctggaaaaccattacaataataagttcattgagaagatccgtggggcaggcttcgatatgcacaccgtggaatgggtagctcgcgagaagattcatggaacgaactttagcgttatcattactccgaccgaaatcgtcccagccaaacgcacagggccgatcttggaaggcgagtcgttctttggtcacgaaattatcatgaagaaatataaagactccttcgtgaaggtgcagaacatgctgaatgccatggatcttgttagcgtgcaaatctttggcgaatttgcgggtggtggcattcagaaaggcgtcgattacggagacaaagatttctatgtgtttgacatcctgtctgatagcgggaacgagaaagtttactgggatgactatactgtcgaatcgttttgcaccacgctcggtctgaaattagcgcctctgctgggacgtggtagtttcgctgaactgtcccagtacccaaacgatttcaaaagcattgtgaactattataatgaattggttgatacgacgggcctggaacatgccaataaacacgtctttggtccgcaagcgtcttctgaaactggcgtagcagaaggctacgttcttaaacccgtctatccgatcttctttaataatggtacacgcgtggcgattaaatgcaagaactccaaattttcggagaaagccaagagcgacaaaccaattaaagcgaaagtggaactgacggagaacgataaacgtgtgctcgaaatctttagcgagtatgttacctggaatcgcgtcagtaacgtactgtcacatattggctcagtgaccgcaaaagattttgggcgtgttatgggtctgacgatgaaagacatcattaatgaagcagcacgcgaaggccatgatatgctgttcgctgataacccgtcggcggtgaagaaagagctgaccattctcatccagaacacgattcgttccaaatggcacgaagttctggag

SEQ ID NO: 168 - protein, 346 aa, synthetic construct
  REGION 1..346: note = Engineered RNA ligase variants
MHHHHHHGGSGMFAMYSSLENHYNNKFIEKIRGAGFDMHTVEWVAREKIHGTNFSVIITPTEIVPAKRTGPILEGESFFGHEIIMKKYKDSFVKVQNMLNAMDLVSVQIFGEFAGGGIQKGVDYGDKDFYVFDILSDSGNEKVYWDDYTVESFCTTLGLKLAPLLGRGSFAELSQYPNDFKSIVNYYNELVDTTGLEHANKHVFGPQASSETGVAEGYVLKPVYPIFFNNGTRVAIKCKNSKFSEKAKSDKPIKAKVELTENDKRVLEIFSEYVTWNRVSNVLSHIGSVTAKDFGRVMGLTMKDIINEAAREGHDMLFADNPSAVKKELTILIQNTIRSKWHEVLE

SEQ ID NO: 169 - DNA, 1038 bp, synthetic construct
  misc_feature 1..1038: note = Engineered RNA ligase variants
  source 1..1038: mol_type = other DNA
atgcatcaccatcaccatcacggtggcagcggtatgtttgcggaatattcaagtctggaaaaccattacaataataagttcattgagaagatccgtggtgcaggcttcgatatgcacaccgtggaatgggtagctcgcgagaagattcatggaacgaactttagcgttatcattactccgaccgaaatcgtcccagccaaacgcacagggccgatcttggaaggcgagtcgttctttggtcacgaaattatcatgaaaaaatataaagactccttcgtgaaggtgcagaacatgctgaatgccatggatcttgttagcgtgcaaatctttggcgaatttgcgggtggtggcattcagaaaggcgtcgattacggagacaaagatttctatgtgtttgacatcctgtctgatagcgggaacgagaaagtttactgggatgactatcgcgtcgaatcgttttgcaccacgctcggtctgaaattagcgcctctgctgggacgtggtagtttcgctgaactgtcccagtacccaaacgatttcaaaagcattgtgaaccgttataatgaattggttgatacgacgggcctggaacatgccaataaacacgtctttggtccgcaagcgtcttctgaaactggcgtagcagaaggctacgttcttaaacccgtctatccgaagttctttaataatggtacacgcgtggcgattaaatgcaagaactccaaattttcggagaaagccaagagcgacaaaccaattaaagcgaaagtggaactgacggagaacgataaacgtgtgctcgaaatctttagcgagtatgttacctggaatcgcgtcagtaacgtactgtcacatattggctcagtgaccgcaaaagattttgggcgtgttatgggtctgacgatgaaagacatcattaatgaagcagcacgcgaaggccatgatatggctttcgctgataacccgtcggcggtgaagaaagagctgaccattctcatccagaacacgattcgttccaaatggcacgaagttctggag

SEQ ID NO: 170 - protein, 346 aa, synthetic construct
  REGION 1..346: note = Engineered RNA ligase variants
MHHHHHHGGSGMFAEYSSLENHYNNKFIEKIRGAGFDMHTVEWVAREKIHGTNFSVIITPTEIVPAKRTGPILEGESFFGHEIIMKKYKDSFVKVQNMLNAMDLVSVQIFGEFAGGGIQKGVDYGDKDFYVFDILSDSGNEKVYWDDYRVESFCTTLGLKLAPLLGRGSFAELSQYPNDFKSIVNRYNELVDTTGLEHANKHVFGPQASSETGVAEGYVLKPVYPKFFNNGTRVAIKCKNSKFSEKAKSDKPIKAKVELTENDKRVLEIFSEYVTWNRVSNVLSHIGSVTAKDFGRVMGLTMKDIINEAAREGHDMAFADNPSAVKKELTILIQNTIRSKWHEVLE

SEQ ID NO: 171 - DNA, 1038 bp, synthetic construct
  misc_feature 1..1038: note = Engineered RNA ligase variants
  source 1..1038: mol_type = other DNA
atgcatcaccatcaccatcacggtggcagcggtatgtttgcgaaatattcaagtctggaaaaccattacaataataagttcattgagaagatccgtctggcaggcttcgatatgcacaccgtggaatgggtagctcgcgagaagattcatggaacgaactttagcgttatcattactccgaccgaaatcgtcccagccaaacgcacagggccgatcttggaaggcgagtcgttctttggtcacgaaattatcatgaagaaatataaagactccttcgtgaaggtgcagaacatgctgaatgccatggatcttgttagcgtgcaaatctttggcgaatttgcgggtggtggcattcagaaaggcgtcgattacggagacaaagatttctatgtgtttgacatcctgtctgatagcgggaacgagaaagtttactgggatgactatactgtcgaatcgtttgcgaccacgctcggtctgaaattagcgcctctgctgggacgtggtagtttcgctgaactgtcccagtacccaaacgatttcaaaagcattgtgaaccgttataatgaattggttgatacgacggacctggaacatgccaataaacacgtctttggtccgcaagcgtcttctgaaactggcgtagcagaaggctacgttcttaaacccgtctatccgaagttctttaataatggtacacgcgtggcgattaaatgcaagaactccaaattttcggagaaagccaagagcgacaaaccaattaaagcgaaagtggaactgacggagaacgataaacgtgtgctcgaaatctttagcgagtatgttacctggaatcgcgtcagtaacgtactgtcacatattggctcagtgaccgcaaaagattttgggcgtgttatgggtctgacgatgaaagacatcattaatgaagcagcacgcgaaggccatgatatgctgttcgctgataacccgtcggcggtgaagaaagagctgaccctgctcatccagaacacgattcgttccaaatggcacgaagttctggag

SEQ ID NO: 172 - protein, 346 aa, synthetic construct
  REGION 1..346: note = Engineered RNA ligase variants
MHHHHHHGGSGMFAKYSSLENHYNNKFIEKIRLAGFDMHTVEWVAREKIHGTNFSVIITPTEIVPAKRTGPILEGESFFGHEIIMKKYKDSFVKVQNMLNAMDLVSVQIFGEFAGGGIQKGVDYGDKDFYVFDILSDSGNEKVYWDDYTVESFATTLGLKLAPLLGRGSFAELSQYPNDFKSIVNRYNELVDTTDLEHANKHVFGPQASSETGVAEGYVLKPVYPKFFNNGTRVAIKCKNSKFSEKAKSDKPIKAKVELTENDKRVLEIFSEYVTWNRVSNVLSHIGSVTAKDFGRVMGLTMKDIINEAAREGHDMLFADNPSAVKKELTLLIQNTIRSKWHEVLE

SEQ ID NO: 173 - DNA, 1038 bp, synthetic construct
  misc_feature 1..1038: note = Engineered RNA ligase variants
  source 1..1038: mol_type = other DNA
atgcatcaccatcaccatcacggtggcagcggtatgtttgcgtattattcaagtctggaaaaccattacaataataagttcattgagaagatccgtctggcaggcttcgatatgcacaccgtggaatgggtagctcgcgagaagattcatggaacgaactttagcgttatcattactccgaccgaaatcgtcccagccaaacgcacagggccgatcttggaaggcgagtcgttctttggtcacgaaattatcatgggcaaatataaagactccttcgtgaaggtgcagaacatgctgaatgccatggatcttgttagcgtgcaaatctttggcgaatttgcgggtggtggcattcagaaaggcgtcgattacggagacaaagatttctatgtgtttgacatcctgtctgatagcgggaacgagaaagtttactgggatgactatcgcgtcgaatcgtttgcgaccgggctcggtctgaaattagcgcctctgctgggacgtggtagtttcgctgaactgtcccagtacccaaacgatttcaaaagcattgtgaactactataatgaattggttgatacgacgggcctggaacatgccaataaacacgtctttggtccgcaagcgtcttctgaaactggcgtagcagaaggctacgttcttaaacccgtctatccgaagttctttaataatggtacacgcgtggcgattaaatgcaagaactccaaattttcggagaaagccaagagcgacaaaccaattaaagcgaaagtggaactgacggagaacgataaacgtgtgctcgaaatctttagcgagtatgttacctggaatcgcgtcagtaacgtactgtcacatattggctcagtgaccgcaaaagattttgggcgtgttatgggtctgacgatgaaagacatcattaatgaagcagcacgcgaaggccatgatatgctgttcgctgataacccgtcggcggtgaagaaagagctgacctggctcatccagaacacgattcgttccaaatggcacgaagttctggag

SEQ ID NO: 174 - protein, 346 aa, synthetic construct
  REGION 1..346: note = Engineered RNA ligase variants
MHHHHHHGGSGMFAYYSSLENHYNNKFIEKIRLAGFDMHTVEWVAREKIHGTNFSVIITPTEIVPAKRTGPILEGESFFGHEIIMGKYKDSFVKVQNMLNAMDLVSVQIFGEFAGGGIQKGVDYGDKDFYVFDILSDSGNEKVYWDDYRVESFATGLGLKLAPLLGRGSFAELSQYPNDFKSIVNYYNELVDTTGLEHANKHVFGPQASSETGVAEGYVLKPVYPKFFNNGTRVAIKCKNSKFSEKAKSDKPIKAKVELTENDKRVLEIFSEYVTWNRVSNVLSHIGSVTAKDFGRVMGLTMKDIINEAAREGHDMLFADNPSAVKKELTWLIQNTIRSKWHEVLE

SEQ ID NO: 175 - DNA, 1038 bp, synthetic construct
  misc_feature 1..1038: note = Engineered RNA ligase variants
  source 1..1038: mol_type = other DNA
atgcatcaccatcaccatcacggtggcagcggtatgtttgcggaatattcaagtctggaaaaccattacaataataagttcattgagaagatccgtggtgcaggcttcgatatgcacaccgtggaatgggtagctcgcgagaagattcatggaacgaactttagcgttatcattactccgaccgaaatcgtcccagccaaacgcacagggccgatcttggaaggcgagtcgttctttggtcacgaaattatcatgggcaaatataaagactccttcgtgaaggtgcagaacatgctgaatgccatggatcttgttagcgtgcaaatctttggcgaatttgcgggtggtggcattcagaaaggcgtcgattacggagacaaagatttctatgtgtttgacatcctgtctgatagcgggaacgagaaagtttactgggatgactatcgcgtcgaatcgttttgcaccacgctcggtctgaaattagcgcctctgctgggacgtggtagtttcgctgaactgtcccagtacccaaacgatttcaaaagcattgtgaaccgttataatgaattggttgatacgacgggcctggaacatgccaataaacacgtctttggtccgcaagcgtcttctgaaactggcgtagcagaaggctacgttcttaaacccgtcaacccgaaattctttaataatggtacacgcgtggcgattaaatgcaagaactccaaattttcggagaaagccaagagcgacaaaccaattaaagcgaaagtggaactgacggagaacgataaacgtgtgctcgaaatctttagcgagtatgttacctggaatcgcgtcagtaacgtactgtcacatattggctcagtgaccgcaaaagattttgggcgtgttatgggtctgacgatgaaagacatcattaatgaagcagcacgcgaaggccatgatatgctgttcgctgataacccgtcggcggtgaagaaagagctgacctggctcatccagaacacgattcgttccaaatggcacgaagttctggag

SEQ ID NO: 176 - protein, 346 aa, synthetic construct
  REGION 1..346: note = Engineered RNA ligase variants
MHHHHHHGGSGMFAEYSSLENHYNNKFIEKIRGAGFDMHTVEWVAREKIHGTNFSVIITPTEIVPAKRTGPILEGESFFGHEIIMGKYKDSFVKVQNMLNAMDLVSVQIFGEFAGGGIQKGVDYGDKDFYVFDILSDSGNEKVYWDDYRVESFCTTLGLKLAPLLGRGSFAELSQYPNDFKSIVNRYNELVDTTGLEHANKHVFGPQASSETGVAEGYVLKPVNPKFFNNGTRVAIKCKNSKFSEKAKSDKPIKAKVELTENDKRVLEIFSEYVTWNRVSNVLSHIGSVTAKDFGRVMGLTMKDIINEAAREGHDMLFADNPSAVKKELTWLIQNTIRSKWHEVLE

SEQ ID NO: 177 - DNA, 1038 bp, synthetic construct
  misc_feature 1..1038: note = Engineered RNA ligase variants
  source 1..1038: mol_type = other DNA
atgcatcaccatcaccatcacggtggcagcggtatgtttgcgaaatattcaagtctggaaaaccattacaataataagttcattgagaagatccgtggtgcaggcttcgatatgcacaccgtggaatgggtagctcgcgagaagattcatggaacgaactttagcgttatcattactccgaccgaaatcgtcccagccaaacgcacagggccgatcttggaaggcgagtcgttctttggtcacgaaattatcatgaaaaaatataaagactccttcgtgaaggtgcagaacatgctgaatgccatggatcttgttagcgtgcaaatctttggcgaatttgcgggtggtggcattcagaaaggcgtcgattacggagacaaagatttctatgtgtttgacatcctgtctgatagcgggaacgagaaagtttactgggatgactatcgcgtcgaatcgtttgcgaccgggctcggtctgaaattagcgcctctgctgggacgtggtagtttcgctgaactgtcccagtacccaaacgatttcaaaagcattgtgaaccgttataatgaattggttgatacgacgggcctggaacatgccaataaacacgtctttggtccgcaagcgtcttctgaaactggcgtagcagaaggctacgttcttaaacccgtcaatccgaagttctttaataatggtacacgcgtggcgattaaatgcaagaactccaaattttcggagaaagccaagagcgacaaaccaattaaagcgaaagtggaactgacggagaacgataaacgtgtgctcgaaatctttagcgagtatgttacctggaatcgcgtcagtaacgtactgtcacatattggctcagtgaccgcaaaagattttgggcgtgttatgggtctgacgatgaaagacatcattaatgaagcagcacgcgaaggccacgatatgctgttcgctgataacccgtcggcggtgaagaaagagctgacctggctcatccagaacacgattcgttccaaatggcacgaagttctggag

SEQ ID NO: 178 - protein, 346 aa, synthetic construct
  REGION 1..346: note = Engineered RNA ligase variants
MHHHHHHGGSGMFAKYSSLENHYNNKFIEKIRGAGFDMHTVEWVAREKIHGTNFSVIITPTEIVPAKRTGPILEGESFFGHEIIMKKYKDSFVKVQNMLNAMDLVSVQIFGEFAGGGIQKGVDYGDKDFYVFDILSDSGNEKVYWDDYRVESFATGLGLKLAPLLGRGSFAELSQYPNDFKSIVNRYNELVDTTGLEHANKHVFGPQASSETGVAEGYVLKPVNPKFFNNGTRVAIKCKNSKFSEKAKSDKPIKAKVELTENDKRVLEIFSEYVTWNRVSNVLSHIGSVTAKDFGRVMGLTMKDIINEAAREGHDMLFADNPSAVKKELTWLIQNTIRSKWHEVLE

SEQ ID NO: 179 - DNA, 1038 bp, synthetic construct
  misc_feature 1..1038: note = Engineered RNA ligase variants
  source 1..1038: mol_type = other DNA
atgcatcaccatcaccatcacggtggcagcggtatgtttgcggaatattcaagtctggaaaaccattacaataataagttcattgagaagatccgtggggcaggcttcgatatgcacaccgtggaatgggtagctcgcgagaagattcatggaacgaactttagcgttatcattactccgaccgaaatcgtcccagccaaacgcacagggccgatcttggaaggcgagtcgttctttggtcacgaaattatcatgaaaaaatataaagactccttcgtgaaggtgcagaacatgctgaatgccatggatcttgttagcgtgcaaatctttggcgaatttgcgggtggtggcattcagaaaggcgtcgattacggagacaaagatttctatgtgtttgacatcctgtctgatagcgggaacgagaaagtttactgggatgactatgtcgtcgaatcgttttgcaccacgctcggtctgaaattagcgcctctgctgggacgtggtagtttcgctgaactgtcccagtacccaaacgatttcaaaagcattgtgaacgactataatgaattggttgatacgacggacctggaacatgccaataaacacgtctttggtccgcaagcgtcttctgaaactggcgtagcagaaggctacgttcttaaacccgtcaatccgatcttctttaataatggtacacgcgtggcgattaaatgcaagaactccaaattttcggagaaagccaagagcgacaaaccaattaaagcgaaagtggaactgacggagaacgataaacgtgtgctcgaaatctttagcgagtatgttacctggaatcgcgtcagtaacgtactgtcacatattggctcagtgaccgcaaaagattttgggcgtgttatgggtctgacgatgaaagacatcattaatgaagcagcacgcgaaggccatgatatgctgttcgctgataacccgtcggcggtgaagaaagagctgacccgcctcatccagaacacgattcgttccaaatggcacgaagttctggag

SEQ ID NO: 180 - protein, 346 aa, synthetic construct
  REGION 1..346: note = Engineered RNA ligase variants
MHHHHHHGGSGMFAEYSSLENHYNNKFIEKIRGAGFDMHTVEWVAREKIHGTNFSVIITPTEIVPAKRTGPILEGESFFGHEIIMKKYKDSFVKVQNMLNAMDLVSVQIFGEFAGGGIQKGVDYGDKDFYVFDILSDSGNEKVYWDDYVVESFCTTLGLKLAPLLGRGSFAELSQYPNDFKSIVNDYNELVDTTDLEHANKHVFGPQASSETGVAEGYVLKPVNPIFFNNGTRVAIKCKNSKFSEKAKSDKPIKAKVELTENDKRVLEIFSEYVTWNRVSNVLSHIGSVTAKDFGRVMGLTMKDIINEAAREGHDMLFADNPSAVKKELTRLIQNTIRSKWHEVLE

SEQ ID NO: 181 - DNA, 1038 bp, synthetic construct
  misc_feature 1..1038: note = Engineered RNA ligase variants
  source 1..1038: mol_type = other DNA
atgcatcaccatcaccatcacggtggcagcggtatgtttgcgtattattcaagtctggaaaaccattacaataataagttcattgagaagatccgtggtgcaggcttcgatatgcacaccgtggaatgggtagctcgcgagaagattcatggaacgaactttagcgttatcattactccgaccgaaatcgtcccagccaaacgcacagggccgatcttggaaggcgagtcgttctttggtcacgaaattatcatgaaaaaatataaagactccttcgtgaaggtgcagaacatgctgaatgccatggatcttgttagcgtgcaaatctttggcgaatttgcgggtggtggcattcagaaaggcgtcgattacggagacaaagatttctatgtgtttgacatcctgtctgatagcgggaacgagaaagtttactgggatgactatactgtcgaatcgttttgcaccgggctcggtctgaaattagcgcctctgctgggacgtggtagtttcgctgaactgtcccagtacccaaacgatttcaaaagcattgtgaaccgttataatgaattggttgatacgacgggcctggaacatgccaataaacacgtctttggtccgcaagcgtcttctgaaactggcgtagcagaaggctacgttcttaaacccgtctatccgatcttctttaataatggtacacgcgtggcgattaaatgcaagaactccaaattttcggagaaagccaagagcgacaaaccaattaaagcgaaagtggaactgacggagaacgataaacgtgtgctcgaaatctttagcgagtatgttacctggaatcgcgtcagtaacgtactgtcacatattggctcagtgaccgcaaaagattttgggcgtgttatgggtctgacgatgaaagacatcattaatgaagcagcacgcgaaggccatgatatgctgttcgctgataacccgtcggcggtgaagaaagagctgaccattctcatccagaacacgattcgttccaaatggcacgaagttctggag

SEQ ID NO: 182 - protein, 346 aa, synthetic construct
  REGION 1..346: note = Engineered RNA ligase variants
MHHHHHHGGSGMFAYYSSLENHYNNKFIEKIRGAGFDMHTVEWVAREKIHGTNFSVIITPTEIVPAKRTGPILEGESFFGHEIIMKKYKDSFVKVQNMLNAMDLVSVQIFGEFAGGGIQKGVDYGDKDFYVFDILSDSGNEKVYWDDYTVESFCTGLGLKLAPLLGRGSFAELSQYPNDFKSIVNRYNELVDTTGLEHANKHVFGPQASSETGVAEGYVLKPVYPIFFNNGTRVAIKCKNSKFSEKAKSDKPIKAKVELTENDKRVLEIFSEYVTWNRVSNVLSHIGSVTAKDFGRVMGLTMKDIINEAAREGHDMLFADNPSAVKKELTILIQNTIRSKWHEVLE

SEQ ID NO: 183 - DNA, 1038 bp, synthetic construct
  misc_feature 1..1038: note = Engineered RNA ligase variants
  source 1..1038: mol_type = other DNA
atgcatcaccatcaccatcacggtggcagcggtatgtttgcgccgtattcaagtctggaaaaccattacaataataagttcattgagaagatccgtggggcaggcttcgatatgcacaccgtggaatgggtagctcgcgagaagattcatggaacgaactttagcgttatcattactccgaccgaaatcgtcccagccaaacgcacagggccgatcttggaaggcgagtcgttctttggtcacgaaattatcatgaaaaaatataaagactccttcgtgaaggtgcagaacatgctgaatgccatggatcttgttagcgtgcaaatctttggcgaatttgcgggtggtggcattcagaaaggcgtcgattacggagacaaagatttctatgtgtttgacatcctgtctgatagcgggaacgagaaagtttactgggatgactatcgcgtcgaatcgttttgcaccacgctcggtctgaaattagcgcctctgctgggacgtggtagtttcgctgaactgtcccagtacccaaacgatttcaaaagcattgtgaactattataatgaattggttgatacgacgggcctggaacatgccaataaacacgtctttggtccgcaagcgtcttctgaaactggcgtagcagaaggctacgttcttaaacccgtctatccgaagttctttaataatggtacacgcgtggcgattaaatgcaagaactccaaattttcggagaaagccaagagcgacaaaccaattaaagcgaaagtggaactgacggagaacgataaacgtgtgctcgaaatctttagcgagtatgttacctggaatcgcgtcagtaacgtactgtcacatattggctcagtgaccgcaaaagattttgggcgtgttatgggtctgacgatgaaagacatcattaatgaagcagcacgcgaaggccatgatatgctgttcgctgataacccgtcggcggtgaagaaagagctgacctggctcatccagaacacgattcgttccaaatggcacgaagttctggag

SEQ ID NO: 184 - protein, 346 aa, synthetic construct
  REGION 1..346: note = Engineered RNA ligase variants
MHHHHHHGGSGMFAPYSSLENHYNNKFIEKIRGAGFDMHTVEWVAREKIHGTNFSVIITPTEIVPAKRTGPILEGESFFGHEIIMKKYKDSFVKVQNMLNAMDLVSVQIFGEFAGGGIQKGVDYGDKDFYVFDILSDSGNEKVYWDDYRVESFCTTLGLKLAPLLGRGSFAELSQYPNDFKSIVNYYNELVDTTGLEHANKHVFGPQASSETGVAEGYVLKPVYPKFFNNGTRVAIKCKNSKFSEKAKSDKPIKAKVELTENDKRVLEIFSEYVTWNRVSNVLSHIGSVTAKDFGRVMGLTMKDIINEAAREGHDMLFADNPSAVKKELTWLIQNTIRSKWHEVLE

SEQ ID NO: 185 - DNA, 1038 bp, synthetic construct
  misc_feature 1..1038: note = Engineered RNA ligase variants
  source 1..1038: mol_type = other DNA
atgcatcaccatcaccatcacggtggcagcggtatgtttgcggaatattcaagtctggaaaaccattacaataataagttcattgagaagatccgtctggcaggcttcgatatgcacaccgtggaatgggtagctcgcgagaagattcatggaacgaactttagcgttatcattactccgaccgaaatcgtcccagccaaacgcacagggccgatcttggaaggcgagtcgttctttggtcacgaaattatcatgaagaaatataaagactccttcgtgaaggtgcagaacatgctgaatgccatggatcttgttagcgtgcaaatctttggcgaatttgcgggtggtggcattcagaaaggcgtcgattacggagacaaagatttctatgtgtttgacatcctgtctgatagcgggaacgagaaagtttactgggatgactatcgcgtcgaatcgttttgcaccacgctcggtctgaaattagcgcctctgctgggacgtggtagtttcgctgaactgtcccagtacccaaacgatttcaaaagcattgtgaactactataatgaattggttgatacgacgggcctggaacatgccaataaacacgtctttggtccgcaagcgtcttctgaaactggcgtagcagaaggctacgttcttaaacccgtcaacccgaaattctttaataatggtacacgcgtggcgattaaatgcaagaactccaaattttcggagaaagccaagagcgacaaaccaattaaagcgaaagtggaactgacggagaacgataaacgtgtgctcgaaatctttagcgagtatgttacctggaatcgcgtcagtaacgtactgtcacatattggctcagtgaccgcaaaagattttgggcgtgttatgggtctgacgatgaaagacatcattaatgaagcagcacgcgaaggccatgatatggctttcgctgataacccgtcggcggtgaagaaagagctgaccctgctcatccagaacacgattcgttccaaatggcacgaagttctggag

SEQ ID NO: 186 - protein, 346 aa, synthetic construct
  REGION 1..346: note = Engineered RNA ligase variants
MHHHHHHGGSGMFAEYSSLENHYNNKFIEKIRLAGFDMHTVEWVAREKIHGTNFSVIITPTEIVPAKRTGPILEGESFFGHEIIMKKYKDSFVKVQNMLNAMDLVSVQIFGEFAGGGIQKGVDYGDKDFYVFDILSDSGNEKVYWDDYRVESFCTTLGLKLAPLLGRGSFAELSQYPNDFKSIVNYYNELVDTTGLEHANKHVFGPQASSETGVAEGYVLKPVNPKFFNNGTRVAIKCKNSKFSEKAKSDKPIKAKVELTENDKRVLEIFSEYVTWNRVSNVLSHIGSVTAKDFGRVMGLTMKDIINEAAREGHDMAFADNPSAVKKELTLLIQNTIRSKWHEVLE

SEQ ID NO: 187 - DNA, 1038 bp, synthetic construct
  misc_feature 1..1038: note = Engineered RNA ligase variants
  source 1..1038: mol_type = other DNA
atgcatcaccatcaccatcacggtggcagcggtatgtttgcggaatattcaagtctggaaaaccattacaataataagttcattgagaagatccgtctggcaggcttcgatatgcacaccgtggaatgggtagctcgcgagaagattcatggaacgaactttagcgttatcattactccgaccgaaatcgtcccagccaaacgcacagggccgatcttggaaggcgagtcgttctttggtcacgaaattatcatgaagaaatataaagactccttcgtgaaggtgcagaacatgctgaatgccatggatcttgttagcgtgcaaatctttggcgaatttgcgggtggtggcattcagaaaggcgtcgattacggagacaaagatttctatgtgtttgacatcctgtctgatagcgggaacgagaaagtttactgggatgactatgtcgtcgaatcgttttgcaccacgctcggtctgaaattagcgcctctgctgggacgtggtagtttcgctgaactgtcccagtacccaaacgatttcaaaagcattgtgaaccgttataatgaattggttgatacgacgggcctggaacatgccaataaacacgtctttggtccgcaagcgtcttctgaaactggcgtagcagaaggctacgttcttaaacccgtctatccgaagttctttaataatggtacacgcgtggcgattaaatgcaagaactccaaattttcggagaaagccaagagcgacaaaccaattaaagcgaaagtggaactgacggagaacgataaacgtgtgctcgaaatctttagcgagtatgttacctggaatcgcgtcagtaacgtactgtcacatattggctcagtgaccgcaaaagattttgggcgtgttatgggtctgacgatgaaagacatcattaatgaagcagcacgcgaaggccatgatatggctttcgctgataacccgtcggcggtgaagaaagagctgaccctgctcatccagaacacgattcgttccaaatggcacgaagttctggag

SEQ ID NO: 188 - protein, 346 aa, synthetic construct
  REGION 1..346: note = Engineered RNA ligase variants
MHHHHHHGGSGMFAEYSSLENHYNNKFIEKIRLAGFDMHTVEWVAREKIHGTNFSVIITPTEIVPAKRTGPILEGESFFGHEIIMKKYKDSFVKVQNMLNAMDLVSVQIFGEFAGGGIQKGVDYGDKDFYVFDILSDSGNEKVYWDDYVVESFCTTLGLKLAPLLGRGSFAELSQYPNDFKSIVNRYNELVDTTGLEHANKHVFGPQASSETGVAEGYVLKPVYPKFFNNGTRVAIKCKNSKFSEKAKSDKPIKAKVELTENDKRVLEIFSEYVTWNRVSNVLSHIGSVTAKDFGRVMGLTMKDIINEAAREGHDMAFADNPSAVKKELTLLIQNTIRSKWHEVLE

SEQ ID NO: 189 - DNA, 1038 bp, synthetic construct
  misc_feature 1..1038: note = Engineered RNA ligase variants
  source 1..1038: mol_type = other DNA
atgcatcaccatcaccatcacggtggcagcggtatgtttgcgccgtattcaagtctggaaaaccattacaataataagttcattgagaagatccgtggtgcaggcttcgatatgcacaccgtggaatgggtagctcgcgagaagattcatggaacgaactttagcgttatcattactccgaccgaaatcgtcccagccaaacgcacagggccgatcttggaaggcgagtcgttctttggtcacgaaattatcatgaagaaatataaagactccttcgtgaaggtgcagaacatgctgaatgccatggatcttgttagcgtgcaaatctttggcgaatttgcgggtggtggcattcagaaaggcgtcgattacggagacaaagatttctatgtgtttgacatcctgtctgatagcgggaacgagaaagtttactgggatgactatcgcgtcgaatcgtttgcgaccgggctcggtctgaaattagcgcctctgctgggacgtggtagtttcgctgaactgtcccagtacccaaacgatttcaaaagcattgtgaacgactataatgaattggttgatacgacgggcctggaacatgccaataaacacgtctttggtccgcaagcgtcttctgaaactggcgtagcagaaggctacgttcttaaacccgtctatccgaagttctttaataatggtacacgcgtggcgattaaatgcaagaactccaaattttcggagaaagccaagagcgacaaaccaattaaagcgaaagtggaactgacggagaacgataaacgtgtgctcgaaatctttagcgagtatgttacctggaatcgcgtcagtaacgtactgtcacatattggctcagtgaccgcaaaagattttgggcgtgttatgggtctgacgatgaaagacatcattaatgaagcagcacgcgaaggccatgatatgttgttcgctgataacccgtcggcggtgaagaaagagctgaccctgctcatccagaacacgattcgttccaaatggcacgaagttctggag

SEQ ID NO: 190 - protein, 346 aa, synthetic construct
  REGION 1..346: note = Engineered RNA ligase variants
MHHHHHHGGSGMFAPYSSLENHYNNKFIEKIRGAGFDMHTVEWVAREKIHGTNFSVIITPTEIVPAKRTGPILEGESFFGHEIIMKKYKDSFVKVQNMLNAMDLVSVQIFGEFAGGGIQKGVDYGDKDFYVFDILSDSGNEKVYWDDYRVESFATGLGLKLAPLLGRGSFAELSQYPNDFKSIVNDYNELVDTTGLEHANKHVFGPQASSETGVAEGYVLKPVYPKFFNNGTRVAIKCKNSKFSEKAKSDKPIKAKVELTENDKRVLEIFSEYVTWNRVSNVLSHIGSVTAKDFGRVMGLTMKDIINEAAREGHDMLFADNPSAVKKELTLLIQNTIRSKWHEVLE

SEQ ID NO: 191 - DNA, 1038 bp, synthetic construct
  misc_feature 1..1038: note = Engineered RNA ligase variants
  source 1..1038: mol_type = other DNA
atgcatcaccatcaccatcacggtggcagcggtatgtttgcgccgtattcaagtctggaaaaccattacaataataagttcattgagaagatccgtctggcaggcttcgatatgcacaccgtggaatgggtagctcgcgagaagattcatggaacgaactttagcgttatcattactccgaccgaaatcgtcccagccaaacgcacagggccgatcttggaaggcgagtcgttctttggtcacgaaattatcatgaaaaaatataaagactccttcgtgaaggtgcagaacatgctgaatgccatggatcttgttagcgtgcaaatctttggcgaatttgcgggtggtggcattcagaaaggcgtcgattacggagacaaagatttctatgtgtttgacatcctgtctgatagcgggaacgagaaagtttactgggatgactatcgcgtcgaatcgttttgcaccacgctcggtctgaaattagcgcctctgctgggacgtggtagtttcgctgaactgtcccagtacccaaacgatttcaaaagcattgtgaactactataatgaattggttgatacgacgggcctggaacatgccaataaacacgtctttggtccgcaagcgtcttctgaaactggcgtagcagaaggctacgttcttaaacccgtctatccgaagttctttaataatggtacacgcgtggcgattaaatgcaagaactccaaattttcggagaaagccaagagcgacaaaccaattaaagcgaaagtggaactgacggagaacgataaacgtgtgctcgaaatctttagcgagtatgttacctggaatcgcgtcagtaacgtactgtcacatattggctcagtgaccgcaaaagattttgggcgtgttatgggtctgacgatgaaagacatcattaatgaagcagcacgcgaaggccatgatatgctgttcgctgataacccgtcggcggtgaagaaagagctgacctggctcatccagaacacgattcgttccaaatggcacgaagttctggag

SEQ ID NO: 192 - protein, 346 aa, synthetic construct
  REGION 1..346: note = Engineered RNA ligase variants
MHHHHHHGGSGMFAPYSSLENHYNNKFIEKIRLAGFDMHTVEWVAREKIHGTNFSVIITPTEIVPAKRTGPILEGESFFGHEIIMKKYKDSFVKVQNMLNAMDLVSVQIFGEFAGGGIQKGVDYGDKDFYVFDILSDSGNEKVYWDDYRVESFCTTLGLKLAPLLGRGSFAELSQYPNDFKSIVNYYNELVDTTGLEHANKHVFGPQASSETGVAEGYVLKPVYPKFFNNGTRVAIKCKNSKFSEKAKSDKPIKAKVELTENDKRVLEIFSEYVTWNRVSNVLSHIGSVTAKDFGRVMGLTMKDIINEAAREGHDMLFADNPSAVKKELTWLIQNTIRSKWHEVLE

SEQ ID NO: 193 - DNA, 1038 bp, synthetic construct
  misc_feature 1..1038: note = Engineered RNA ligase variants
  source 1..1038: mol_type = other DNA
atgcatcaccatcaccatcacggtggcagcggtatgtttgcgccgtattcaagtctggaaaaccattacaataataagttcattgagaagatccgtggtgcaggcttcgatatgcacaccgtggaatgggtagctcgcgagaagattcatggaacgaactttagcgttatcattactccgaccgaaatcgtcccagccaaacgcacagggccgatcttggaaggcgagtcgttctttggtcacgaaattatcatgaaaaaatataaagactccttcgtgaaggtgcagaacatgctgaatgccatggatcttgttagcgtgcaaatctttggcgaatttgcgggtggtggcattcagaaaggcgtcgattacggagacaaagatttctatgtgtttgacatcctgtctgatagcgggaacgagaaagtttactgggatgactatactgtcgaatcgttttgcaccacgctcggtctgaaattagcgcctctgctgggacgtggtagtttcgctgaactgtcccagtacccaaacgatttcaaaagcattgtgaactattataatgaattggttgatacgacggacctggaacatgccaataaacacgtctttggtccgcaagcgtcttctgaaactggcgtagcagaaggctacgttcttaaacccgtctatccgatcttctttaataatggtacacgcgtggcgattaaatgcaagaactccaaattttcggagaaagccaagagcgacaaaccaattaaagcgaaagtggaactgacggagaacgataaacgtgtgctcgaaatctttagcgagtatgttacctggaatcgcgtcagtaacgtactgtcacatattggctcagtgaccgcaaaagattttgggcgtgttatgggtctgacgatgaaagacatcattaatgaagcagcacgcgaaggccatgatatggctttcgctgataacccgtcggcggtgaagaaagagctgacctggctcatccagaacacgattcgttccaaatggcacgaagttctggag

SEQ ID NO: 194 - protein, 346 aa, synthetic construct
  REGION 1..346: note = Engineered RNA ligase variants
MHHHHHHGGSGMFAPYSSLENHYNNKFIEKIRGAGFDMHTVEWVAREKIHGTNFSVIITPTEIVPAKRTGPILEGESFFGHEIIMKKYKDSFVKVQNMLNAMDLVSVQIFGEFAGGGIQKGVDYGDKDFYVFDILSDSGNEKVYWDDYTVESFCTTLGLKLAPLLGRGSFAELSQYPNDFKSIVNYYNELVDTTDLEHANKHVFGPQASSETGVAEGYVLKPVYPIFFNNGTRVAIKCKNSKFSEKAKSDKPIKAKVELTENDKRVLEIFSEYVTWNRVSNVLSHIGSVTAKDFGRVMGLTMKDIINEAAREGHDMAFADNPSAVKKELTWLIQNTIRSKWHEVLE

SEQ ID NO: 195 - DNA, 1038 bp, synthetic construct
  misc_feature 1..1038: note = Engineered RNA ligase variants
  source 1..1038: mol_type = other DNA
atgcatcaccatcaccatcacggtggcagcggtatgtttgcgccgtattcaagtctggaaaaccattacaataataagttcattgagaagatccgtctggcaggcttcgatatgcacaccgtggaatgggtagctcgcgagaagattcatggaacgaactttagcgttatcattactccgaccgaaatcgtcccagccaaacgcacagggccgatcttggaaggcgagtcgttctttggtcacgaaattatcatgaagaaatataaagactccttcgtgaaggtgcagaacatgctgaatgccatggatcttgttagcgtgcaaatctttggcgaatttgcgggtggtggcattcagaaaggcgtcgattacggagacaaagatttctatgtgtttgacatcctgtctgatagcgggaacgagaaagtttactgggatgactatactgtcgaatcgtttgcgaccacgctcggtctgaaattagcgcctctgctgggacgtggtagtttcgctgaactgtcccagtacccaaacgatttcaaaagcattgtgaactattataatgaattggttgatacgacgggcctggaacatgccaataaacacgtctttggtccgcaagcgtcttctgaaactggcgtagcagaaggctacgttcttaaacccgtcaacccgaaattctttaataatggtacacgcgtggcgattaaatgcaagaactccaaattttcggagaaagccaagagcgacaaaccaattaaagcgaaagtggaactgacggagaacgataaacgtgtgctcgaaatctttagcgagtatgttacctggaatcgcgtcagtaacgtactgtcacatattggctcagtgaccgcaaaagattttgggcgtgttatgggtctgacgatgaaagacatcattaatgaagcagcacgcgaaggccatgatatgctgttcgctgataacccgtcggcggtgaagaaagagctgacctggctcatccagaacacgattcgttccaaatggcacgaagttctggag

SEQ ID NO: 196 - protein, 346 aa, synthetic construct
  REGION 1..346: note = Engineered RNA ligase variants
MHHHHHHGGSGMFAPYSSLENHYNNKFIEKIRLAGFDMHTVEWVAREKIHGTNFSVIITPTEIVPAKRTGPILEGESFFGHEIIMKKYKDSFVKVQNMLNAMDLVSVQIFGEFAGGGIQKGVDYGDKDFYVFDILSDSGNEKVYWDDYTVESFATTLGLKLAPLLGRGSFAELSQYPNDFKSIVNYYNELVDTTGLEHANKHVFGPQASSETGVAEGYVLKPVNPKFFNNGTRVAIKCKNSKFSEKAKSDKPIKAKVELTENDKRVLEIFSEYVTWNRVSNVLSHIGSVTAKDFGRVMGLTMKDIINEAAREGHDMLFADNPSAVKKELTWLIQNTIRSKWHEVLE

SEQ ID NO: 197 - DNA, 1038 bp, synthetic construct
  misc_feature 1..1038: note = Engineered RNA ligase variants
  source 1..1038: mol_type = other DNA
atgcatcaccatcaccatcacggtggcagcggtatgtttgcgccgtattcaagtctggaaaaccattacaataataagttcattgagaagatccgtggggcaggcttcgatatgcacaccgtggaatgggtagctcgcgagaagattcatggaacgaactttagcgttatcattactccgaccgaaatcgtcccagccaaacgcacagggccgatcttggaaggcgagtcgttctttggtcacgaaattatcatgaagaaatataaagactccttcgtgaaggtgcagaacatgctgaatgccatggatcttgttagcgtgcaaatctttggcgaatttgcgggtggtggcattcagaaaggcgtcgattacggagacaaagatttctatgtgtttgacatcctgtctgatagcgggaacgagaaagtttactgggatgactatactgtcgaatcgttttgcaccacgctcggtctgaaattagcgcctctgctgggacgtggtagtttcgctgaactgtcccagtacccaaacgatttcaaaagcattgtgaacgactataatgaattggttgatacgacggacctggaacatgccaataaacacgtctttggtccgcaagcgtcttctgaaactggcgtagcagaaggctacgttcttaaacccgtctatccgatcttctttaataatggtacacgcgtggcgattaaatgcaagaactccaaattttcggagaaagccaagagcgacaaaccaattaaagcgaaagtggaactgacggagaacgataaacgtgtgctcgaaatctttagcgagtatgttacctggaatcgcgtcagtaacgtactgtcacatattggctcagtgaccgcaaaagattttgggcgtgttatgggtctgacgatgaaagacatcattaatgaagcagcacgcgaaggccatgatatgctgttcgctgataacccgtcggcggtgaagaaagagctgaccctgctcatccagaacacgattcgttccaaatggcacgaagttctggag

SEQ ID NO: 198 - protein, 346 aa, synthetic construct
  REGION 1..346: note = Engineered RNA ligase variants
MHHHHHHGGSGMFAPYSSLENHYNNKFIEKIRGAGFDMHTVEWVAREKIHGTNFSVIITPTEIVPAKRTGPILEGESFFGHEIIMKKYKDSFVKVQNMLNAMDLVSVQIFGEFAGGGIQKGVDYGDKDFYVFDILSDSGNEKVYWDDYTVESFCTTLGLKLAPLLGRGSFAELSQYPNDFKSIVNDYNELVDTTDLEHANKHVFGPQASSETGVAEGYVLKPVYPIFFNNGTRVAIKCKNSKFSEKAKSDKPIKAKVELTENDKRVLEIFSEYVTWNRVSNVLSHIGSVTAKDFGRVMGLTMKDIINEAAREGHDMLFADNPSAVKKELTLLIQNTIRSKWHEVLE

SEQ ID NO: 199 - DNA, 1038 bp, synthetic construct
  misc_feature 1..1038: note = Engineered RNA ligase variants
  source 1..1038: mol_type = other DNA
atgcatcaccatcaccatcacggtggcagcggtatgtttgcgaaatattcaagtctggaaaaccattacaataataagttcattgagaagatccgtggggcaggcttcgatatgcacaccgtggaatgggtagctcgcgagaagattcatggaacgaactttagcgttatcattactccgaccgaaatcgtcccagccaaacgcacagggccgatcttggaaggcgagtcgttctttggtcacgaaattatcatgaagaaatataaagactccttcgtgaaggtgcagaacatgctgaatgccatggatcttgttagcgtgcaaatctttggcgaatttgcgggtggtggcattcagaaaggcgtcgattacggagacaaagatttctatgtgtttgacatcctgtctgatagcgggaacgagaaagtttactgggatgactatgtcgtcgaatcgttttgcaccacgctcggtctgaaattagcgcctctgctgggacgtggtagtttcgctgaactgtcccagtacccaaacgatttcaaaagcattgtgaactactataatgaattggttgatacgacgggcctggaacatgccaataaacacgtctttggtccgcaagcgtcttctgaaactggcgtagcagaaggctacgttcttaaacccgtctatccgatcttctttaataatggtacacgcgtggcgattaaatgcaagaactccaaattttcggagaaagccaagagcgacaaaccaattaaagcgaaagtggaactgacggagaacgataaacgtgtgctcgaaatctttagcgagtatgttacctggaatcgcgtcagtaacgtactgtcacatattggctcagtgaccgcaaaagattttgggcgtgttatgggtctgacgatgaaagacatcattaatgaagcagcacgcgaaggccatgatatgctgttcgctgataacccgtcggcggtgaagaaagagctgaccattctcatccagaacacgattcgttccaaatggcacgaagttctggag

SEQ ID NO: 200 - protein, 346 aa, synthetic construct
  REGION 1..346: note = Engineered RNA ligase variants
MHHHHHHGGSGMFAKYSSLENHYNNKFIEKIRGAGFDMHTVEWVAREKIHGTNFSVIITPTEIVPAKRTGPILEGESFFGHEIIMKKYKDSFVKVQNMLNAMDLVSVQIFGEFAGGGIQKGVDYGDKDFYVFDILSDSGNEKVYWDDYVVESFCTTLGLKLAPLLGRGSFAELSQYPNDFKSIVNYYNELVDTTGLEHANKHVFGPQASSETGVAEGYVLKPVYPIFFNNGTRVAIKCKNSKFSEKAKSDKPIKAKVELTENDKRVLEIFSEYVTWNRVSNVLSHIGSVTAKDFGRVMGLTMKDIINEAAREGHDMLFADNPSAVKKELTILIQNTIRSKWHEVLE

SEQ ID NO: 201 - DNA, 1038 bp, synthetic construct
  misc_feature 1..1038: note = Engineered RNA ligase variants
  source 1..1038: mol_type = other DNA
atgcatcaccatcaccatcacggtggcagcggtatgtttgcgtattattcaagtctggaaaaccattacaataataagttcattgagaagatccgtctggcaggcttcgatatgcacaccgtggaatgggtagctcgcgagaagattcatggaacgaactttagcgttatcattactccgaccgaaatcgtcccagccaaacgcacagggccgatcttggaaggcgagtcgttctttggtcacgaaattatcatgggcaaatataaagactccttcgtgaaggtgcagaacatgctgaatgccatggatcttgttagcgtgcaaatctttggcgaatttgcgggtggtggcattcagaaaggcgtcgattacggagacaaagatttctatgtgtttgacatcctgtctgatagcgggaacgagaaagtttactgggatgactatcgcgtcgaatcgttttgcaccacgctcggtctgaaattagcgcctctgctgggacgtggtagtttcgctgaactgtcccagtacccaaacgatttcaaaagcattgtgaacgactataatgaattggttgatacgacgggcctggaacatgccaataaacacgtctttggtccgcaagcgtcttctgaaactggcgtagcagaaggctacgttcttaaacccgtctatccgaagttctttaataatggtacacgcgtggcgattaaatgcaagaactccaaattttcggagaaagccaagagcgacaaaccaattaaagcgaaagtggaactgacggagaacgataaacgtgtgctcgaaatctttagcgagtatgttacctggaatcgcgtcagtaacgtactgtcacatattggctcagtgaccgcaaaagattttgggcgtgttatgggtctgacgatgaaagacatcattaatgaagcagcacgcgaaggccatgatatggctttcgctgataacccgtcggcggtgaagaaagagctgacctggctcatccagaacacgattcgttccaaatggcacgaagttctggag

SEQ ID NO: 202 - protein, 346 aa, synthetic construct
  REGION 1..346: note = Engineered RNA ligase variants
MHHHHHHGGSGMFAYYSSLENHYNNKFIEKIRLAGFDMHTVEWVAREKIHGTNFSVIITPTEIVPAKRTGPILEGESFFGHEIIMGKYKDSFVKVQNMLNAMDLVSVQIFGEFAGGGIQKGVDYGDKDFYVFDILSDSGNEKVYWDDYRVESFCTTLGLKLAPLLGRGSFAELSQYPNDFKSIVNDYNELVDTTGLEHANKHVFGPQASSETGVAEGYVLKPVYPKFFNNGTRVAIKCKNSKFSEKAKSDKPIKAKVELTENDKRVLEIFSEYVTWNRVSNVLSHIGSVTAKDFGRVMGLTMKDIINEAAREGHDMAFADNPSAVKKELTWLIQNTIRSKWHEVLE

SEQ ID NO: 203 - DNA, 1038 bp, synthetic construct
  misc_feature 1..1038: note = Engineered RNA ligase variants
  source 1..1038: mol_type = other DNA
atgcatcaccatcaccatcacggtggcagcggtatgtttgcgtattattcaagtctggaaaaccattacaataataagttcattgagaagatccgtggtgcaggcttcgatatgcacaccgtggaatgggtagctcgcgagaagattcatggaacgaactttagcgttatcattactccgaccgaaatcgtcccagccaaacgcacagggccgatcttggaaggcgagtcgttctttggtcacgaaattatcatgaaaaaatataaagactccttcgtgaaggtgcagaacatgctgaatgccatggatcttgttagcgtgcaaatctttggcgaatttgcgggtggtggcattcagaaaggcgtcgattacggagacaaagatttctatgtgtttgacatcctgtctgatagcgggaacgagaaagtttactgggatgactatcgcgtcgaatcgttttgcaccacgctcggtctgaaattagcgcctctgctgggacgtggtagtttcgctgaactgtcccagtacccaaacgatttcaaaagcattgtgaaccgttataatgaattggttgatacgacgggcctggaacatgccaataaacacgtctttggtccgcaagcgtcttctgaaactggcgtagcagaaggctacgttcttaaacccgtctatccgatcttctttaataatggtacacgcgtggcgattaaatgcaagaactccaaattttcggagaaagccaagagcgacaaaccaattaaagcgaaagtggaactgacggagaacgataaacgtgtgctcgaaatctttagcgagtatgttacctggaatcgcgtcagtaacgtactgtcacatattggctcagtgaccgcaaaagattttgggcgtgttatgggtctgacgatgaaagacatcattaatgaagcagcacgcgaaggccatgatatgttgttcgctgataacccgtcggcggtgaagaaagagctgaccattctcatccagaacacgattcgttccaaatggcacgaagttctggag

SEQ ID NO: 204 - protein, 346 aa, synthetic construct
  REGION 1..346: note = Engineered RNA ligase variants
MHHHHHHGGSGMFAYYSSLENHYNNKFIEKIRGAGFDMHTVEWVAREKIHGTNFSVIITPTEIVPAKRTGPILEGESFFGHEIIMKKYKDSFVKVQNMLNAMDLVSVQIFGEFAGGGIQKGVDYGDKDFYVFDILSDSGNEKVYWDDYRVESFCTTLGLKLAPLLGRGSFAELSQYPNDFKSIVNRYNELVDTTGLEHANKHVFGPQASSETGVAEGYVLKPVYPIFFNNGTRVAIKCKNSKFSEKAKSDKPIKAKVELTENDKRVLEIFSEYVTWNRVSNVLSHIGSVTAKDFGRVMGLTMKDIINEAAREGHDMLFADNPSAVKKELTILIQNTIRSKWHEVLE

SEQ ID NO: 205 - DNA, 1038 bp, synthetic construct
  misc_feature 1..1038: note = Engineered RNA ligase variants
  source 1..1038: mol_type = other DNA
atgcatcaccatcaccatcacggtggcagcggtatgtttgcgccgtattcaagtctggaaaaccattacaataataagttcattgagaagatccgtctggcaggcttcgatatgcacaccgtggaatgggtagctcgcgagaagattcatggaacgaactttagcgttatcattactccgaccgaaatcgtcccagccaaacgcacagggccgatcttggaaggcgagtcgttctttggtcacgaaattatcatgaaaaaatataaagactccttcgtgaaggtgcagaacatgctgaatgccatggatcttgttagcgtgcaaatctttggcgaatttgcgggtggtggcattcagaaaggcgtcgattacggagacaaagatttctatgtgtttgacatcctgtctgatagcgggaacgagaaagtttactgggatgactatcgcgtcgaatcgtttgcgaccgggctcggtctgaaattagcgcctctgctgggacgtggtagtttcgctgaactgtcccagtacccaaacgatttcaaaagcattgtgaactactataatgaattggttgatacgacgggcctggaacatgccaataaacacgtctttggtccgcaagcgtcttctgaaactggcgtagcagaaggctacgttcttaaacccgtcaatccgaagttctttaataatggtacacgcgtggcgattaaatgcaagaactccaaattttcggagaaagccaagagcgacaaaccaattaaagcgaaagtggaactgacggagaacgataaacgtgtgctcgaaatctttagcgagtatgttacctggaatcgcgtcagtaacgtactgtcacatattggctcagtgaccgcaaaagattttgggcgtgttatgggtctgacgatgaaagacatcattaatgaagcagcacgcgaaggccatgatatggctttcgctgataacccgtcggcggtgaagaaagagctgaccctgctcatccagaacacgattcgttccaaatggcacgaagttctggag

SEQ ID NO: 206 - protein, 346 aa, synthetic construct
  REGION 1..346: note = Engineered RNA ligase variants
MHHHHHHGGSGMFAPYSSLENHYNNKFIEKIRLAGFDMHTVEWVAREKIHGTNFSVIITPTEIVPAKRTGPILEGESFFGHEIIMKKYKDSFVKVQNMLNAMDLVSVQIFGEFAGGGIQKGVDYGDKDFYVFDILSDSGNEKVYWDDYRVESFATGLGLKLAPLLGRGSFAELSQYPNDFKSIVNYYNELVDTTGLEHANKHVFGPQASSETGVAEGYVLKPVNPKFFNNGTRVAIKCKNSKFSEKAKSDKPIKAKVELTENDKRVLEIFSEYVTWNRVSNVLSHIGSVTAKDFGRVMGLTMKDIINEAAREGHDMAFADNPSAVKKELTLLIQNTIRSKWHEVLE

SEQ ID NO: 207 - DNA, 1038 bp, synthetic construct
  misc_feature 1..1038: note = Engineered RNA ligase variants
  source 1..1038: mol_type = other DNA
atgcatcaccatcaccatcacggtggcagcggtatgtttgcggaatattcaagtctggaaaaccattacaataataagttcattgagaagatccgtggggcaggcttcgatatgcacaccgtggaatgggtagctcgcgagaagattcatggaacgaactttagcgttatcattactccgaccgaaatcgtcccagccaaacgcacagggccgatcttggaaggcgagtcgttctttggtcacgaaattatcatgaagaaatataaagactccttcgtgaaggtgcagaacatgctgaatgccatggatcttgttagcgtgcaaatctttggcgaatttgcgggtggtggcattcagaaaggcgtcgattacggagacaaagatttctatgtgtttgacatcctgtctgatagcgggaacgagaaagtttactgggatgactatactgtcgaatcgttttgcaccgggctcggtctgaaattagcgcctctgctgggacgtggtagtttcgctgaactgtcccagtacccaaacgatttcaaaagcattgtgaactattataatgaattggttgatacgacggacctggaacatgccaataaacacgtctttggtccgcaagcgtcttctgaaactggcgtagcagaaggctacgttcttaaacccgtctatccgaagttctttaataatggtacacgcgtggcgattaaatgcaagaactccaaattttcggagaaagccaagagcgacaaaccaattaaagcgaaagtggaactgacggagaacgataaacgtgtgctcgaaatctttagcgagtatgttacctggaatcgcgtcagtaacgtactgtcacatattggctcagtgaccgcaaaagattttgggcgtgttatgggtctgacgatgaaagacatcattaatgaagcagcacgcgaaggccatgatatgctgttcgctgataacccgtcggcggtgaagaaagagctgacccgcctcatccagaacacgattcgttccaaatggcacgaagttctggag

SEQ ID NO: 208 - protein, 346 aa, synthetic construct
  REGION 1..346: note = Engineered RNA ligase variants
MHHHHHHGGSGMFAEYSSLENHYNNKFIEKIRGAGFDMHTVEWVAREKIHGTNFSVIITPTEIVPAKRTGPILEGESFFGHEIIMKKYKDSFVKVQNMLNAMDLVSVQIFGEFAGGGIQKGVDYGDKDFYVFDILSDSGNEKVYWDDYTVESFCTGLGLKLAPLLGRGSFAELSQYPNDFKSIVNYYNELVDTTDLEHANKHVFGPQASSETGVAEGYVLKPVYPKFFNNGTRVAIKCKNSKFSEKAKSDKPIKAKVELTENDKRVLEIFSEYVTWNRVSNVLSHIGSVTAKDFGRVMGLTMKDIINEAAREGHDMLFADNPSAVKKELTRLIQNTIRSKWHEVLE

SEQ ID NO: 209 - DNA, 1038 bp, synthetic construct
  misc_feature 1..1038: note = Engineered RNA ligase variants
  source 1..1038: mol_type = other DNA
atgcatcaccatcaccatcacggtggcagcggtatgtttgcgaaatattcaagtctggaaaaccattacaataataagttcattgagaagatccgtggtgcaggcttcgatatgcacaccgtggaatgggtagctcgcgagaagattcatggaacgaactttagcgttatcattactccgaccgaaatcgtcccagccaaacgcacagggccgatcttggaaggcgagtcgttctttggtcacgaaattatcatgaagaaatataaagactccttcgtgaaggtgcagaacatgctgaatgccatggatcttgttagcgtgcaaatctttggcgaatttgcgggtggtggcattcagaaaggcgtcgattacggagacaaagatttctatgtgtttgacatcctgtctgatagcgggaacgagaaagtttactgggatgactatactgtcgaatcgttttgcaccacgctcggtctgaaattagcgcctctgctgggacgtggtagtttcgctgaactgtcccagtacccaaacgatttcaaaagcattgtgaactactataatgaattggttgatacgacgggcctggaacatgccaataaacacgtctttggtccgcaagcgtcttctgaaactggcgtagcagaaggctacgttcttaaacccgtctatccgatcttctttaataatggtacacgcgtggcgattaaatgcaagaactccaaattttcggagaaagccaagagcgacaaaccaattaaagcgaaagtggaactgacggagaacgataaacgtgtgctcgaaatctttagcgagtatgttacctggaatcgcgtcagtaacgtactgtcacatattggctcagtgaccgcaaaagattttgggcgtgttatgggtctgacgatgaaagacatcattaatgaagcagcacgcgaaggccatgatatgctgttcgctgataacccgtcggcggtgaagaaagagctgacccgcctcatccagaacacgattcgttccaaatggcacgaagttctggag

SEQ ID NO: 210 - protein, 346 aa, synthetic construct
  REGION 1..346: note = Engineered RNA ligase variants
MHHHHHHGGSGMFAKYSSLENHYNNKFIEKIRGAGFDMHTVEWVAREKIHGTNFSVIITPTEIVPAKRTGPILEGESFFGHEIIMKKYKDSFVKVQNMLNAMDLVSVQIFGEFAGGGIQKGVDYGDKDFYVFDILSDSGNEKVYWDDYTVESFCTTLGLKLAPLLGRGSFAELSQYPNDFKSIVNYYNELVDTTGLEHANKHVFGPQASSETGVAEGYVLKPVYPIFFNNGTRVAIKCKNSKFSEKAKSDKPIKAKVELTENDKRVLEIFSEYVTWNRVSNVLSHIGSVTAKDFGRVMGLTMKDIINEAAREGHDMLFADNPSAVKKELTRLIQNTIRSKWHEVLE

SEQ ID NO: 211 - DNA, 1038 bp, synthetic construct
  misc_feature 1..1038: note = Engineered RNA ligase variants
  source 1..1038: mol_type = other DNA
atgcatcaccatcaccatcacggtggcagcggtatgtttgcgatgtattcaagtctggaaaaccattacaataataagttcattgagaagatccgtggggcaggcttcgatatgcacaccgtggaatgggtagctcgcgagaagattcatggaacgaactttagcgttatcattactccgaccgaaatcgtcccagccaaacgcacagggccgatcttggaaggcgagtcgttctttggtcacgaaattatcatgaagaaatataaagactccttcgtgaaggtgcagaacatgctgaatgccatggatcttgttagcgtgcaaatctttggcgaatttgcgggtggtggcattcagaaaggcgtcgattacggagacaaagatttctatgtgtttgacatcctgtctgatagcgggaacgagaaagtttactgggatgactatcgcgtcgaatcgttttgcaccgggctcggtctgaaattagcgcctctgctgggacgtggtagtttcgctgaactgtcccagtacccaaacgatttcaaaagcattgtgaactactataatgaattggttgatacgacgggcctggaacatgccaataaacacgtctttggtccgcaagcgtcttctgaaactggcgtagcagaaggctacgttcttaaacccgtcaacccgaaattctttaataatggtacacgcgtggcgattaaatgcaagaactccaaattttcggagaaagccaagagcgacaaaccaattaaagcgaaagtggaactgacggagaacgataaacgtgtgctcgaaatctttagcgagtatgttacctggaatcgcgtcagtaacgtactgtcacatattggctcagtgaccgcaaaagattttgggcgtgttatgggtctgacgatgaaagacatcattaatgaagcagcacgcgaaggccatgatatgctgttcgctgataacccgtcggcggtgaagaaagagctgaccctgctcatccagaacacgattcgttccaaatggcacgaagttctggag

SEQ ID NO: 212 - protein, 346 aa, synthetic construct
  REGION 1..346: note = Engineered RNA ligase variants
MHHHHHHGGSGMFAMYSSLENHYNNKFIEKIRGAGFDMHTVEWVAREKIHGTNFSVIITPTEIVPAKRTGPILEGESFFGHEIIMKKYKDSFVKVQNMLNAMDLVSVQIFGEFAGGGIQKGVDYGDKDFYVFDILSDSGNEKVYWDDYRVESFCTGLGLKLAPLLGRGSFAELSQYPNDFKSIVNYYNELVDTTGLEHANKHVFGPQASSETGVAEGYVLKPVNPKFFNNGTRVAIKCKNSKFSEKAKSDKPIKAKVELTENDKRVLEIFSEYVTWNRVSNVLSHIGSVTAKDFGRVMGLTMKDIINEAAREGHDMLFADNPSAVKKELTLLIQNTIRSKWHEVLE

SEQ ID NO: 213 - DNA, 1038 bp, synthetic construct
  misc_feature 1..1038: note = Engineered RNA ligase variants
  source 1..1038: mol_type = other DNA
atgcatcaccatcaccatcacggtggcagcggtatgtttgcgtattattcaagtctggaaaaccattacaataataagttcattgagaagatccgtggggcaggcttcgatatgcacaccgtggaatgggtagctcgcgagaagattcatggaacgaactttagcgttatcattactccgaccgaaatcgtcccagccaaacgcacagggccgatcttggaaggcgagtcgttctttggtcacgaaattatcatgaagaaatataaagactccttcgtgaaggtgcagaacatgctgaatgccatggatcttgttagcgtgcaaatctttggcgaatttgcgggtggtggcattcagaaaggcgtcgattacggagacaaagatttctatgtgtttgacatcctgtctgatagcgggaacgagaaagtttactgggatgactatcgcgtcgaatcgttttgcaccacgctcggtctgaaattagcgcctctgctgggacgtggtagtttcgctgaactgtcccagtacccaaacgatttcaaaagcattgtgaaccgttataatgaattggttgatacgacgggcctggaacatgccaataaacacgtctttggtccgcaagcgtcttctgaaactggcgtagcagaaggctacgttcttaaacccgtcaacccgaaattctttaataatggtacacgcgtggcgattaaatgcaagaactccaaattttcggagaaagccaagagcgacaaaccaattaaagcgaaagtggaactgacggagaacgataaacgtgtgctcgaaatctttagcgagtatgttacctggaatcgcgtcagtaacgtactgtcacatattggctcagtgaccgcaaaagattttgggcgtgttatgggtctgacgatgaaagacatcattaatgaagcagcacgcgaaggccatgatatgttgttcgctgataacccgtcggcggtgaagaaagagctgaccattctcatccagaacacgattcgttccaaatggcacgaagttctggag

SEQ ID NO: 214 - protein, 346 aa, synthetic construct
  REGION 1..346: note = Engineered RNA ligase variants
MHHHHHHGGSGMFAYYSSLENHYNNKFIEKIRGAGFDMHTVEWVAREKIHGTNFSVIITPTEIVPAKRTGPILEGESFFGHEIIMKKYKDSFVKVQNMLNAMDLVSVQIFGEFAGGGIQKGVDYGDKDFYVFDILSDSGNEKVYWDDYRVESFCTTLGLKLAPLLGRGSFAELSQYPNDFKSIVNRYNELVDTTGLEHANKHVFGPQASSETGVAEGYVLKPVNPKFFNNGTRVAIKCKNSKFSEKAKSDKPIKAKVELTENDKRVLEIFSEYVTWNRVSNVLSHIGSVTAKDFGRVMGLTMKDIINEAAREGHDMLFADNPSAVKKELTILIQNTIRSKWHEVLE

SEQ ID NO: 215 - DNA, 1038 bp, synthetic construct
  misc_feature 1..1038: note = Engineered RNA ligase variants
  source 1..1038: mol_type = other DNA
atgcatcaccatcaccatcacggtggcagcggtatgtttgcggaatattcaagtctggaaaaccattacaataataagttcattgagaagatccgtggggcaggcttcgatatgcacaccgtggaatgggtagctcgcgagaagattcatggaacgaactttagcgttatcattactccgaccgaaatcgtcccagccaaacgcacagggccgatcttggaaggcgagtcgttctttggtcacgaaattatcatgaagaaatataaagactccttcgtgaaggtgcagaacatgctgaatgccatggatcttgttagcgtgcaaatctttggcgaatttgcgggtggtggcattcagaaaggcgtcgattacggagacaaagatttctatgtgtttgacatcctgtctgatagcgggaacgagaaagtttactgggatgactatactgtcgaatcgttttgcaccacgctcggtctgaaattagcgcctctgctgggacgtggtagtttcgctgaactgtcccagtacccaaacgatttcaaaagcattgtgaaccgttataatgaattggttgatacgacgggcctggaacatgccaataaacacgtctttggtccgcaagcgtcttctgaaactggcgtagcagaaggctacgttcttaaacccgtcaatccgaagttctttaataatggtacacgcgtggcgattaaatgcaagaactccaaattttcggagaaagccaagagcgacaaaccaattaaagcgaaagtggaactgacggagaacgataaacgtgtgctcgaaatctttagcgagtatgttacctggaatcgcgtcagtaacgtactgtcacatattggctcagtgaccgcaaaagattttgggcgtgttatgggtctgacgatgaaagacatcattaatgaagcagcacgcgaaggccatgatatgctgttcgctgataacccgtcggcggtgaagaaagagctgacccgcctcatccagaacacgattcgttccaaatggcacgaagttctggag

SEQ ID NO: 216 - protein, 346 aa, synthetic construct
  REGION 1..346: note = Engineered RNA ligase variants
MHHHHHHGGSGMFAEYSSLENHYNNKFIEKIRGAGFDMHTVEWVAREKIHGTNFSVIITPTEIVPAKRTGPILEGESFFGHEIIMKKYKDSFVKVQNMLNAMDLVSVQIFGEFAGGGIQKGVDYGDKDFYVFDILSDSGNEKVYWDDYTVESFCTTLGLKLAPLLGRGSFAELSQYPNDFKSIVNRYNELVDTTGLEHANKHVFGPQASSETGVAEGYVLKPVNPKFFNNGTRVAIKCKNSKFSEKAKSDKPIKAKVELTENDKRVLEIFSEYVTWNRVSNVLSHIGSVTAKDFGRVMGLTMKDIINEAAREGHDMLFADNPSAVKKELTRLIQNTIRSKWHEVLE

SEQ ID NO: 217 - DNA, 1038 bp, synthetic construct
  misc_feature 1..1038: note = Engineered RNA ligase variants
  source 1..1038: mol_type = other DNA
atgcatcaccatcaccatcacggtggcagcggtatgtttgcgatgtattcaagtctggaaaaccattacaataataagttcattgagaagatccgtctggcaggcttcgatatgcacaccgtggaatgggtagctcgcgagaagattcatggaacgaactttagcgttatcattactccgaccgaaatcgtcccagccaaacgcacagggccgatcttggaaggcgagtcgttctttggtcacgaaattatcatgaagaaatataaagactccttcgtgaaggtgcagaacatgctgaatgccatggatcttgttagcgtgcaaatctttggcgaatttgcgggtggtggcattcagaaaggcgtcgattacggagacaaagatttctatgtgtttgacatcctgtctgatagcgggaacgagaaagtttactgggatgactatactgtcgaatcgttttgcaccacgctcggtctgaaattagcgcctctgctgggacgtggtagtttcgctgaactgtcccagtacccaaacgatttcaaaagcattgtgaaccgttataatgaattggttgatacgacgggcctggaacatgccaataaacacgtctttggtccgcaagcgtcttctgaaactggcgtagcagaaggctacgttcttaaacccgtcaacccgaaattctttaataatggtacacgcgtggcgattaaatgcaagaactccaaattttcggagaaagccaagagcgacaaaccaattaaagcgaaagtggaactgacggagaacgataaacgtgtgctcgaaatctttagcgagtatgttacctggaatcgcgtcagtaacgtactgtcacatattggctcagtgaccgcaaaagattttgggcgtgttatgggtctgacgatgaaagacatcattaatgaagcagcacgcgaaggccatgatatgctgttcgctgataacccgtcggcggtgaagaaagagctgaccattctcatccagaacacgattcgttccaaatggcacgaagttctggag

SEQ ID NO: 218 - protein, 346 aa, synthetic construct
  REGION 1..346: note = Engineered RNA ligase variants
MHHHHHHGGSGMFAMYSSLENHYNNKFIEKIRLAGFDMHTVEWVAREKIHGTNFSVIITPTEIVPAKRTGPILEGESFFGHEIIMKKYKDSFVKVQNMLNAMDLVSVQIFGEFAGGGIQKGVDYGDKDFYVFDILSDSGNEKVYWDDYTVESFCTTLGLKLAPLLGRGSFAELSQYPNDFKSIVNRYNELVDTTGLEHANKHVFGPQASSETGVAEGYVLKPVNPKFFNNGTRVAIKCKNSKFSEKAKSDKPIKAKVELTENDKRVLEIFSEYVTWNRVSNVLSHIGSVTAKDFGRVMGLTMKDIINEAAREGHDMLFADNPSAVKKELTILIQNTIRSKWHEVLE

SEQ ID NO: 219 - DNA, 1038 bp, synthetic construct
  misc_feature 1..1038: note = Engineered RNA ligase variants
  source 1..1038: mol_type = other DNA
atgcatcaccatcaccatcacggtggcagcggtatgtttgcgccgtattcaagtctggaaaaccattacaataataagttcattgagaagatccgtctggcaggcttcgatatgcacaccgtggaatgggtagctcgcgagaagattcatggaacgaactttagcgttatcattactccgaccgaaatcgtcccagccaaacgcacagggccgatcttggaaggcgagtcgttctttggtcacgaaattatcatgggcaaatataaagactccttcgtgaaggtgcagaacatgctgaatgccatggatcttgttagcgtgcaaatctttggcgaatttgcgggtggtggcattcagaaaggcgtcgattacggagacaaagatttctatgtgtttgacatcctgtctgatagcgggaacgagaaagtttactgggatgactatcgcgtcgaatcgttttgcaccgggctcggtctgaaattagcgcctctgctgggacgtggtagtttcgctgaactgtcccagtacccaaacgatttcaaaagcattgtgaactactataatgaattggttgatacgacgggcctggaacatgccaataaacacgtctttggtccgcaagcgtcttctgaaactggcgtagcagaaggctacgttcttaaacccgtctatccgaagttctttaataatggtacacgcgtggcgattaaatgcaagaactccaaattttcggagaaagccaagagcgacaaaccaattaaagcgaaagtggaactgacggagaacgataaacgtgtgctcgaaatctttagcgagtatgttacctggaatcgcgtcagtaacgtactgtcacatattggctcagtgaccgcaaaagattttgggcgtgttatgggtctgacgatgaaagacatcattaatgaagcagcacgcgaaggccatgatatggctttcgctgataacccgtcggcggtgaagaaagagctgacccgcctcatccagaacacgattcgttccaaatggcacgaagttctggag

SEQ ID NO: 220 - protein, 346 aa, synthetic construct
  REGION 1..346: note = Engineered RNA ligase variants
MHHHHHHGGSGMFAPYSSLENHYNNKFIEKIRLAGFDMHTVEWVAREKIHGTNFSVIITPTEIVPAKRTGPILEGESFFGHEIIMGKYKDSFVKVQNMLNAMDLVSVQIFGEFAGGGIQKGVDYGDKDFYVFDILSDSGNEKVYWDDYRVESFCTGLGLKLAPLLGRGSFAELSQYPNDFKSIVNYYNELVDTTGLEHANKHVFGPQASSETGVAEGYVLKPVYPKFFNNGTRVAIKCKNSKFSEKAKSDKPIKAKVELTENDKRVLEIFSEYVTWNRVSNVLSHIGSVTAKDFGRVMGLTMKDIINEAAREGHDMAFADNPSAVKKELTRLIQNTIRSKWHEVLE

SEQ ID NO: 221 - DNA, 1038 bp, synthetic construct
  misc_feature 1..1038: note = Engineered RNA ligase variants
  source 1..1038: mol_type = other DNA
atgcatcaccatcaccatcacggtggcagcggtatgtttgcgaaatattcaagtctggaaaaccattacaataataagttcattgagaagatccgtggggcaggcttcgatatgcacaccgtggaatgggtagctcgcgagaagattcatggaacgaactttagcgttatcattactccgaccgaaatcgtcccagccaaacgcacagggccgatcttggaaggcgagtcgttctttggtcacgaaattatcatgaaaaaatataaagactccttcgtgaaggtgcagaacatgctgaatgccatggatcttgttagcgtgcaaatctttggcgaatttgcgggtggtggcattcagaaaggcgtcgattacggagacaaagatttctatgtgtttgacatcctgtctgatagcgggaacgagaaagtttactgggatgactatcgcgtcgaatcgtttgcgaccgggctcggtctgaaattagcgcctctgctgggacgtggtagtttcgctgaactgtcccagtacccaaacgatttcaaaagcattgtgaacgactataatgaattggttgatacgacgggcctggaacatgccaataaacacgtctttggtccgcaagcgtcttctgaaactggcgtagcagaaggctacgttcttaaacccgtctatccgatcttctttaataatggtacacgcgtggcgattaaatgcaagaactccaaattttcggagaaagccaagagcgacaaaccaattaaagcgaaagtggaactgacggagaacgataaacgtgtgctcgaaatctttagcgagtatgttacctggaatcgcgtcagtaacgtactgtcacatattggctcagtgaccgcaaaagattttgggcgtgttatgggtctgacgatgaaagacatcattaatgaagcagcacgcgaaggccatgatatgctgttcgctgataacccgtcggcggtgaagaaagagctgacccgcctcatccagaacacgattcgttccaaatggcacgaagttctggag

SEQ ID NO: 222 - protein, 346 aa, synthetic construct
  REGION 1..346: note = Engineered RNA ligase variants
MHHHHHHGGSGMFAKYSSLENHYNNKFIEKIRGAGFDMHTVEWVAREKIHGTNFSVIITPTEIVPAKRTGPILEGESFFGHEIIMKKYKDSFVKVQNMLNAMDLVSVQIFGEFAGGGIQKGVDYGDKDFYVFDILSDSGNEKVYWDDYRVESFATGLGLKLAPLLGRGSFAELSQYPNDFKSIVNDYNELVDTTGLEHANKHVFGPQASSETGVAEGYVLKPVYPIFFNNGTRVAIKCKNSKFSEKAKSDKPIKAKVELTENDKRVLEIFSEYVTWNRVSNVLSHIGSVTAKDFGRVMGLTMKDIINEAAREGHDMLFADNPSAVKKELTRLIQNTIRSKWHEVLE

SEQ ID NO: 223 - DNA, 1038 bp, synthetic construct
  misc_feature 1..1038: note = Engineered RNA ligase variants
  source 1..1038: mol_type = other DNA
atgcatcaccatcaccatcacggtggcagcggtatgtttgcgaaatattcaagtctggaaaaccattacaataataagttcattgagaagatccgtggtgcaggcttcgatatgcacaccgtggaatgggtagctcgcgagaagattcatggaacgaactttagcgttatcattactccgaccgaaatcgtcccagccaaacgcacagggccgatcttggaaggcgagtcgttctttggtcacgaaattatcatgaagaaatataaagactccttcgtgaaggtgcagaacatgctgaatgccatggatcttgttagcgtgcaaatctttggcgaatttgcgggtggtggcattcagaaaggcgtcgattacggagacaaagatttctatgtgtttgacatcctgtctgatagcgggaacgagaaagtttactgggatgactatcgcgtcgaatcgtttgcgaccacgctcggtctgaaattagcgcctctgctgggacgtggtagtttcgctgaactgtcccagtacccaaacgatttcaaaagcattgtgaactattataatgaattggttgatacgacgggcctggaacatgccaataaacacgtctttggtccgcaagcgtcttctgaaactggcgtagcagaaggctacgttcttaaacccgtcaacccgaaattctttaataatggtacacgcgtggcgattaaatgcaagaactccaaattttcggagaaagccaagagcgacaaaccaattaaagcgaaagtggaactgacggagaacgataaacgtgtgctcgaaatctttagcgagtatgttacctggaatcgcgtcagtaacgtactgtcacatattggctcagtgaccgcaaaagattttgggcgtgttatgggtctgacgatgaaagacatcattaatgaagcagcacgcgaaggccatgatatgttgttcgctgataacccgtcggcggtgaagaaagagctgaccattctcatccagaacacgattcgttccaaatggcacgaagttctggag

SEQ ID NO: 224 - protein, 346 aa, synthetic construct
  REGION 1..346: note = Engineered RNA ligase variants
MHHHHHHGGSGMFAKYSSLENHYNNKFIEKIRGAGFDMHTVEWVAREKIHGTNFSVIITPTEIVPAKRTGPILEGESFFGHEIIMKKYKDSFVKVQNMLNAMDLVSVQIFGEFAGGGIQKGVDYGDKDFYVFDILSDSGNEKVYWDDYRVESFATTLGLKLAPLLGRGSFAELSQYPNDFKSIVNYYNELVDTTGLEHANKHVFGPQASSETGVAEGYVLKPVNPKFFNNGTRVAIKCKNSKFSEKAKSDKPIKAKVELTENDKRVLEIFSEYVTWNRVSNVLSHIGSVTAKDFGRVMGLTMKDIINEAAREGHDMLFADNPSAVKKELTILIQNTIRSKWHEVLE

SEQ ID NO: 225 - DNA, 1038 bp, synthetic construct
  misc_feature 1..1038: note = Engineered RNA ligase variants
  source 1..1038: mol_type = other DNA
atgcatcaccatcaccatcacggtggcagcggtatgtttgcgatgtattcaagtctggaaaaccattacaataataagttcattgagaagatccgtggggcaggcttcgatatgcacaccgtggaatgggtagctcgcgagaagattcatggaacgaactttagcgttatcattactccgaccgaaatcgtcccagccaaacgcacagggccgatcttggaaggcgagtcgttctttggtcacgaaattatcatgaagaaatataaagactccttcgtgaaggtgcagaacatgctgaatgccatggatcttgttagcgtgcaaatctttggcgaatttgcgggtggtggcattcagaaaggcgtcgattacggagacaaagatttctatgtgtttgacatcctgtctgatagcgggaacgagaaagtttactgggatgactatactgtcgaatcgtttgcgaccgggctcggtctgaaattagcgcctctgctgggacgtggtagtttcgctgaactgtcccagtacccaaacgatttcaaaagcattgtgaaccgttataatgaattggttgatacgacggacctggaacatgccaataaacacgtctttggtccgcaagcgtcttctgaaactggcgtagcagaaggctacgttcttaaacccgtctatccgaagttctttaataatggtacacgcgtggcgattaaatgcaagaactccaaattttcggagaaagccaagagcgacaaaccaattaaagcgaaagtggaactgacggagaacgataaacgtgtgctcgaaatctttagcgagtatgttacctggaatcgcgtcagtaacgtactgtcacatattggctcagtgaccgcaaaagattttgggcgtgttatgggtctgacgatgaaagacatcattaatgaagcagcacgcgaaggccatgatatggctttcgctgataacccgtcggcggtgaagaaagagctgaccattctcatccagaacacgattcgttccaaatggcacgaagttctggag

SEQ ID NO: 226 - protein, 346 aa, synthetic construct
  REGION 1..346: note = Engineered RNA ligase variants
MHHHHHHGGSGMFAMYSSLENHYNNKFIEKIRGAGFDMHTVEWVAREKIHGTNFSVIITPTEIVPAKRTGPILEGESFFGHEIIMKKYKDSFVKVQNMLNAMDLVSVQIFGEFAGGGIQKGVDYGDKDFYVFDILSDSGNEKVYWDDYTVESFATGLGLKLAPLLGRGSFAELSQYPNDFKSIVNRYNELVDTTDLEHANKHVFGPQASSETGVAEGYVLKPVYPKFFNNGTRVAIKCKNSKFSEKAKSDKPIKAKVELTENDKRVLEIFSEYVTWNRVSNVLSHIGSVTAKDFGRVMGLTMKDIINEAAREGHDMAFADNPSAVKKELTILIQNTIRSKWHEVLE

SEQ ID NO: 227 - DNA, 1038 bp, synthetic construct
  misc_feature 1..1038: note = Engineered RNA ligase variants
  source 1..1038: mol_type = other DNA
atgcatcaccatcaccatcacggtggcagcggtatgtttgcgccgtattcaagtctggaaaaccattacaataataagttcattgagaagatccgtggggcaggcttcgatatgcacaccgtggaatgggtagctcgcgagaagattcatggaacgaactttagcgttatcattactccgaccgaaatcgtcccagccaaacgcacagggccgatcttggaaggcgagtcgttctttggtcacgaaattatcatgaaaaaatataaagactccttcgtgaaggtgcagaacatgctgaatgccatggatcttgttagcgtgcaaatctttggcgaatttgcgggtggtggcattcagaaaggcgtcgattacggagacaaagatttctatgtgtttgacatcctgtctgatagcgggaacgagaaagtttactgggatgactatgtcgtcgaatcgtttgcgaccacgctcggtctgaaattagcgcctctgctgggacgtggtagtttcgctgaactgtcccagtacccaaacgatttcaaaagcattgtgaactattataatgaattggttgatacgacgggcctggaacatgccaataaacacgtctttggtccgcaagcgtcttctgaaactggcgtagcagaaggctacgttcttaaacccgtctatccgatcttctttaataatggtacacgcgtggcgattaaatgcaagaactccaaattttcggagaaagccaagagcgacaaaccaattaaagcgaaagtggaactgacggagaacgataaacgtgtgctcgaaatctttagcgagtatgttacctggaatcgcgtcagtaacgtactgtcacatattggctcagtgaccgcaaaagattttgggcgtgttatgggtctgacgatgaaagacatcattaatgaagcagcacgcgaaggccatgatatggctttcgctgataacccgtcggcggtgaagaaagagctgaccctgctcatccagaacacgattcgttccaaatggcacgaagttctggag

SEQ ID NO: 228 - protein, 346 aa, synthetic construct
  REGION 1..346: note = Engineered RNA ligase variants
MHHHHHHGGSGMFAPYSSLENHYNNKFIEKIRGAGFDMHTVEWVAREKIHGTNFSVIITPTEIVPAKRTGPILEGESFFGHEIIMKKYKDSFVKVQNMLNAMDLVSVQIFGEFAGGGIQKGVDYGDKDFYVFDILSDSGNEKVYWDDYVVESFATTLGLKLAPLLGRGSFAELSQYPNDFKSIVNYYNELVDTTGLEHANKHVFGPQASSETGVAEGYVLKPVYPIFFNNGTRVAIKCKNSKFSEKAKSDKPIKAKVELTENDKRVLEIFSEYVTWNRVSNVLSHIGSVTAKDFGRVMGLTMKDIINEAAREGHDMAFADNPSAVKKELTLLIQNTIRSKWHEVLE

SEQ ID NO: 229 - DNA, 1038 bp, synthetic construct
  misc_feature 1..1038: note = Engineered RNA ligase variants
  source 1..1038: mol_type = other DNA
atgcatcaccatcaccatcacggtggcagcggtatgtttgcgatgtattcaagtctggaaaaccattacaataataagttcattgagaagatccgtggggcaggcttcgatatgcacaccgtggaatgggtagctcgcgagaagattcatggaacgaactttagcgttatcattactccgaccgaaatcgtcccagccaaacgcacagggccgatcttggaaggcgagtcgttctttggtcacgaaattatcatgaagaaatataaagactccttcgtgaaggtgcagaacatgctgaatgccatggatcttgttagcgtgcaaatctttggcgaatttgcgggtggtggcattcagaaaggcgtcgattacggagacaaagatttctatgtgtttgacatcctgtctgatagcgggaacgagaaagtttactgggatgactatgtagtcgaatcgtttgcaaccggcctcggtctgaaattagcgcctctgctgggacgtggtagtttcgctgaactgtcccagtacccaaacgatttcaaaagcattgtgaactactataatgaattggttgatacgacgggcctggaacatgccaataaacacgtctttggtccgcaagcgtcttctgaaactggcgtagcagaaggctacgttcttaaacccgtcaacccgaaattctttaataatggtacacgcgtggcgattaaatgcaagaactccaaattttcggagaaagccaagagcgacaaaccaattaaagcgaaagtggaactgacggagaacgataaacgtgtgctcgaaatctttagcgagtatgttacctggaatcgcgtcagtaacgtactgtcacatattggctcagtgaccgcaaaagattttgggcgtgttatgggtctgacgatgaaagacatcattaatgaagcagcacgcgaaggccatgatatggctttcgctgataacccgtcggcggtgaagaaagagctgacccgcctcatccagaacacgattcgttccaaatggcacgaagttctggag

SEQ ID NO: 230 - protein, 346 aa, synthetic construct
  REGION 1..346: note = Engineered RNA ligase variants
MHHHHHHGGSGMFAMYSSLENHYNNKFIEKIRGAGFDMHTVEWVAREKIHGTNFSVIITPTEIVPAKRTGPILEGESFFGHEIIMKKYKDSFVKVQNMLNAMDLVSVQIFGEFAGGGIQKGVDYGDKDFYVFDILSDSGNEKVYWDDYVVESFATGLGLKLAPLLGRGSFAELSQYPNDFKSIVNYYNELVDTTGLEHANKHVFGPQASSETGVAEGYVLKPVNPKFFNNGTRVAIKCKNSKFSEKAKSDKPIKAKVELTENDKRVLEIFSEYVTWNRVSNVLSHIGSVTAKDFGRVMGLTMKDIINEAAREGHDMAFADNPSAVKKELTRLIQNTIRSKWHEVLE

SEQ ID NO: 231 - DNA, 1038 bp, synthetic construct
  misc_feature 1..1038: note = Engineered RNA ligase variants
  source 1..1038: mol_type = other DNA
atgcatcaccatcaccatcacggtggcagcggtatgtttgcgaaatattcaagtctggaaaaccattacaataataagttcattgagaagatccgtggggcaggcttcgatatgcacaccgtggaatgggtagctcgcgagaagattcatggaacgaactttagcgttatcattactccgaccgaaatcgtcccagccaaacgcacagggccgatcttggaaggcgagtcgttctttggtcacgaaattatcatgaagaaatataaagactccttcgtgaaggtgcagaacatgctgaatgccatggatcttgttagcgtgcaaatctttggcgaatttgcgggtggtggcattcagaaaggcgtcgattacggagacaaagatttctatgtgtttgacatcctgtctgatagcgggaacgagaaagtttactgggatgactatcgcgtcgaatcgtttgcgaccgggctcggtctgaaattagcgcctctgctgggacgtggtagtttcgctgaactgtcccagtacccaaacgatttcaaaagcattgtgaactattataatgaattggttgatacgacggacctggaacatgccaataaacacgtctttggtccgcaagcgtcttctgaaactggcgtagcagaaggctacgttcttaaacccgtctatccgaagttctttaataatggtacacgcgtggcgattaaatgcaagaactccaaattttcggagaaagccaagagcgacaaaccaattaaagcgaaagtggaactgacggagaacgataaacgtgtgctcgaaatctttagcgagtatgttacctggaatcgcgtcagtaacgtactgtcacatattggctcagtgaccgcaaaagattttgggcgtgttatgggtctgacgatgaaagacatcattaatgaagcagcacgcgaaggccatgatatgttgttcgctgataacccgtcggcggtgaagaaagagctgacccgcctcatccagaacacgattcgttccaaatggcacgaagttctggag

SEQ ID NO: 232 - protein, 346 aa, synthetic construct
  REGION 1..346: note = Engineered RNA ligase variants
MHHHHHHGGSGMFAKYSSLENHYNNKFIEKIRGAGFDMHTVEWVAREKIHGTNFSVIITPTEIVPAKRTGPILEGESFFGHEIIMKKYKDSFVKVQNMLNAMDLVSVQIFGEFAGGGIQKGVDYGDKDFYVFDILSDSGNEKVYWDDYRVESFATGLGLKLAPLLGRGSFAELSQYPNDFKSIVNYYNELVDTTDLEHANKHVFGPQASSETGVAEGYVLKPVYPKFFNNGTRVAIKCKNSKFSEKAKSDKPIKAKVELTENDKRVLEIFSEYVTWNRVSNVLSHIGSVTAKDFGRVMGLTMKDIINEAAREGHDMLFADNPSAVKKELTRLIQNTIRSKWHEVLE

SEQ ID NO: 233 - DNA, 1038 bp, synthetic construct
  misc_feature 1..1038: note = Engineered RNA ligase variants
  source 1..1038: mol_type = other DNA
atgcatcaccatcaccatcacggtggcagcggtatgtttgcggaatattcaagtctggaaaaccattacaataataagttcattgagaagatccgtggtgcaggcttcgatatgcacaccgtggaatgggtagctcgcgagaagattcatggaacgaactttagcgttatcattactccgaccgaaatcgtcccagccaaacgcacagggccgatcttggaaggcgagtcgttctttggtcacgaaattatcatgaaaaaatataaagactccttcgtgaaggtgcagaacatgctgaatgccatggatcttgttagcgtgcaaatctttggcgaatttgcgggtggtggcattcagaaaggcgtcgattacggagacaaagatttctatgtgtttgacatcctgtctgatagcgggaacgagaaagtttactgggatgactatgtagtcgaatcgtttgcaaccggcctcggtctgaaattagcgcctctgctgggacgtggtagtttcgctgaactgtcccagtacccaaacgatttcaaaagcattgtgaactattataatgaattggttgatacgacgggcctggaacatgccaataaacacgtctttggtccgcaagcgtcttctgaaactggcgtagcagaaggctacgttcttaaacccgtctatccgatcttctttaataatggtacacgcgtggcgattaaatgcaagaactccaaattttcggagaaagccaagagcgacaaaccaattaaagcgaaagtggaactgacggagaacgataaacgtgtgctcgaaatctttagcgagtatgttacctggaatcgcgtcagtaacgtactgtcacatattggctcagtgaccgcaaaagattttgggcgtgttatgggtctgacgatgaaagacatcattaatgaagcagcacgcgaaggccatgatatggctttcgctgataacccgtcggcggtgaagaaagagctgacctggctcatccagaacacgattcgttccaaatggcacgaagttctggag

SEQ ID NO: 234 - protein, 346 aa, synthetic construct
  REGION 1..346: note = Engineered RNA ligase variants
MHHHHHHGGSGMFAEYSSLENHYNNKFIEKIRGAGFDMHTVEWVAREKIHGTNFSVIITPTEIVPAKRTGPILEGESFFGHEIIMKKYKDSFVKVQNMLNAMDLVSVQIFGEFAGGGIQKGVDYGDKDFYVFDILSDSGNEKVYWDDYVVESFATGLGLKLAPLLGRGSFAELSQYPNDFKSIVNYYNELVDTTGLEHANKHVFGPQASSETGVAEGYVLKPVYPIFFNNGTRVAIKCKNSKFSEKAKSDKPIKAKVELTENDKRVLEIFSEYVTWNRVSNVLSHIGSVTAKDFGRVMGLTMKDIINEAAREGHDMAFADNPSAVKKELTWLIQNTIRSKWHEVLE

SEQ ID NO: 235 - DNA, 1038 bp, synthetic construct
  misc_feature 1..1038: note = Engineered RNA ligase variants
  source 1..1038: mol_type = other DNA
atgcatcaccatcaccatcacggtggcagcggtatgtttgcgccgtattcaagtctggaaaaccattacaataataagttcattgagaagatccgtctggcaggcttcgatatgcacaccgtggaatgggtagctcgcgagaagattcatggaacgaactttagcgttatcattactccgaccgaaatcgtcccagccaaacgcacagggccgatcttggaaggcgagtcgttctttggtcacgaaattatcatgggcaaatataaagactccttcgtgaaggtgcagaacatgctgaatgccatggatcttgttagcgtgcaaatctttggcgaatttgcgggtggtggcattcagaaaggcgtcgattacggagacaaagatttctatgtgtttgacatcctgtctgatagcgggaacgagaaagtttactgggatgactatcgcgtcgaatcgttttgcaccgggctcggtctgaaattagcgcctctgctgggacgtggtagtttcgctgaactgtcccagtacccaaacgatttcaaaagcattgtgaactactataatgaattggttgatacgacgggcctggaacatgccaataaacacgtctttggtccgcaagcgtcttctgaaactggcgtagcagaaggctacgttcttaaacccgtcaatccgaagttctttaataatggtacacgcgtggcgattaaatgcaagaactccaaattttcggagaaagccaagagcgacaaaccaattaaagcgaaagtggaactgacggagaacgataaacgtgtgctcgaaatctttagcgagtatgttacctggaatcgcgtcagtaacgtactgtcacatattggctcagtgaccgcaaaagattttgggcgtgttatgggtctgacgatgaaagacatcattaatgaagcagcacgcgaaggccatgatatggctttcgctgataacccgtcggcggtgaagaaagagctgaccattctcatccagaacacgattcgttccaaatggcacgaagttctggag

SEQ ID NO: 236 - protein, 346 aa, synthetic construct
  REGION 1..346: note = Engineered RNA ligase variants
MHHHHHHGGSGMFAPYSSLENHYNNKFIEKIRLAGFDMHTVEWVAREKIHGTNFSVIITPTEIVPAKRTGPILEGESFFGHEIIMGKYKDSFVKVQNMLNAMDLVSVQIFGEFAGGGIQKGVDYGDKDFYVFDILSDSGNEKVYWDDYRVESFCTGLGLKLAPLLGRGSFAELSQYPNDFKSIVNYYNELVDTTGLEHANKHVFGPQASSETGVAEGYVLKPVNPKFFNNGTRVAIKCKNSKFSEKAKSDKPIKAKVELTENDKRVLEIFSEYVTWNRVSNVLSHIGSVTAKDFGRVMGLTMKDIINEAAREGHDMAFADNPSAVKKELTILIQNTIRSKWHEVLE

SEQ ID NO: 237 - DNA, 1038 bp, synthetic construct
  misc_feature 1..1038: note = Engineered RNA ligase variants
  source 1..1038: mol_type = other DNA
atgcatcaccatcaccatcacggtggcagcggtatgtttgcgatgtattcaagtctggaaaaccattacaataataagttcattgagaagatccgtggggcaggcttcgatatgcacaccgtggaatgggtagctcgcgagaagattcatggaacgaactttagcgttatcattactccgaccgaaatcgtcccagccaaacgcacagggccgatcttggaaggcgagtcgttctttggtcacgaaattatcatgggcaaatataaagactccttcgtgaaggtgcagaacatgctgaatgccatggatcttgttagcgtgcaaatctttggcgaatttgcgggtggtggcattcagaaaggcgtcgattacggagacaaagatttctatgtgtttgacatcctgtctgatagcgggaacgagaaagtttactgggatgactatgtcgtcgaatcgttttgcaccacgctcggtctgaaattagcgcctctgctgggacgtggtagtttcgctgaactgtcccagtacccaaacgatttcaaaagcattgtgaaccgttataatgaattggttgatacgacgggcctggaacatgccaataaacacgtctttggtccacaagcgtcttctgaaactggcgtagcagaaggctacgttcttaaacccgtctatccgatcttctttaataatggtacacgcgtggcgattaaatgcaagaactccaaattttcggagaaagccaagagcgacaaaccaattaaagcgaaagtggaactgacggagaacgataaacgtgtgctcgaaatctttagcgagtatgttacctggaatcgcgtcagtaacgtactgtcacatattggctcagtgaccgcaaaagattttgggcgtgttatgggtctgacgatgaaagacatcattaatgaagcagcacgcgaaggccatgatatgttgttcgctgataacccgtcggcggtgaagaaagagctgaccctgctcatccagaacacgattcgttccaaatggcacgaagttctggag

SEQ ID NO: 238 - protein, 346 aa, synthetic construct
  REGION 1..346: note = Engineered RNA ligase variants
MHHHHHHGGSGMFAMYSSLENHYNNKFIEKIRGAGFDMHTVEWVAREKIHGTNFSVIITPTEIVPAKRTGPILEGESFFGHEIIMGKYKDSFVKVQNMLNAMDLVSVQIFGEFAGGGIQKGVDYGDKDFYVFDILSDSGNEKVYWDDYVVESFCTTLGLKLAPLLGRGSFAELSQYPNDFKSIVNRYNELVDTTGLEHANKHVFGPQASSETGVAEGYVLKPVYPIFFNNGTRVAIKCKNSKFSEKAKSDKPIKAKVELTENDKRVLEIFSEYVTWNRVSNVLSHIGSVTAKDFGRVMGLTMKDIINEAAREGHDMLFADNPSAVKKELTLLIQNTIRSKWHEVLE

SEQ ID NO: 239 - DNA, 1038 bp, synthetic construct
  misc_feature 1..1038: note = Engineered RNA ligase variants
  source 1..1038: mol_type = other DNA
atgcatcaccatcaccatcacggtggcagcggtatgtttgcgccgtattcaagtctggaaaaccattacaataataagttcattgagaagatccgtggtgcaggcttcgatatgcacaccgtggaatgggtagctcgcgagaagattcatggaacgaactttagcgttatcattactccgaccgaaatcgtcccagccaaacgcacagggccgatcttggaaggcgagtcgttctttggtcacgaaattatcatgaaaaaatataaagactccttcgtgaaggtgcagaacatgctgaatgccatggatcttgttagcgtgcaaatctttggcgaatttgcgggtggtggcattcagaaaggcgtcgattacggagacaaagatttctatgtgtttgacatcctgtctgatagcgggaacgagaaagtttactgggatgactatcgcgtcgaatcgtttgcgaccgggctcggtctgaaattagcgcctctgctgggacgtggtagtttcgctgaactgtcccagtacccaaacgatttcaaaagcattgtgaactattataatgaattggttgatacgacggacctggaacatgccaataaacacgtctttggtccgcaagcgtcttctgaaactggcgtagcagaaggctacgttcttaaacccgtctatccgaagttctttaataatggtacacgcgtggcgattaaatgcaagaactccaaattttcggagaaagccaagagcgacaaaccaattaaagcgaaagtggaactgacggagaacgataaacgtgtgctcgaaatctttagcgagtatgttacctggaatcgcgtcagtaacgtactgtcacatattggctcagtgaccgcaaaagattttgggcgtgttatgggtctgacgatgaaagacatcattaatgaagcagcacgcgaaggccatgatatggctttcgctgataacccgtcggcggtgaagaaagagctgacccgcctcatccagaacacgattcgttccaaatggcacgaagttctggag

SEQ ID NO: 240 - protein, 346 aa, synthetic construct
  REGION 1..346: note = Engineered RNA ligase variants
MHHHHHHGGSGMFAPYSSLENHYNNKFIEKIRGAGFDMHTVEWVAREKIHGTNFSVIITPTEIVPAKRTGPILEGESFFGHEIIMKKYKDSFVKVQNMLNAMDLVSVQIFGEFAGGGIQKGVDYGDKDFYVFDILSDSGNEKVYWDDYRVESFATGLGLKLAPLLGRGSFAELSQYPNDFKSIVNYYNELVDTTDLEHANKHVFGPQASSETGVAEGYVLKPVYPKFFNNGTRVAIKCKNSKFSEKAKSDKPIKAKVELTENDKRVLEIFSEYVTWNRVSNVLSHIGSVTAKDFGRVMGLTMKDIINEAAREGHDMAFADNPSAVKKELTRLIQNTIRSKWHEVLE

SEQ ID NO: 241 - DNA, 1038 bp, synthetic construct
  misc_feature 1..1038: note = Engineered RNA ligase variants
  source 1..1038: mol_type = other DNA
atgcatcaccatcaccatcacggtggcagcggtatgtttgcgatgtattcaagtctggaaaaccattacaataataagttcattgagaagatccgtggtgcaggcttcgatatgcacaccgtggaatgggtagctcgcgagaagattcatggaacgaactttagcgttatcattactccgaccgaaatcgtcccagccaaacgcacagggccgatcttggaaggcgagtcgttctttggtcacgaaattatcatgaagaaatataaagactccttcgtgaaggtgcagaacatgctgaatgccatggatcttgttagcgtgcaaatctttggcgaatttgcgggtggtggcattcagaaaggcgtcgattacggagacaaagatttctatgtgtttgacatcctgtctgatagcgggaacgagaaagtttactgggatgactatgtcgtcgaatcgttttgcaccacgctcggtctgaaattagcgcctctgctgggacgtggtagtttcgctgaactgtcccagtacccaaacgatttcaaaagcattgtgaaccgttataatgaattggttgatacgacggacctggaacatgccaataaacacgtctttggtccgcaagcgtcttctgaaactggcgtagcagaaggctacgttcttaaacccgtcaacccgaaattctttaataatggtacacgcgtggcgattaaatgcaagaactccaaattttcggagaaagccaagagcgacaaaccaattaaagcgaaagtggaactgacggagaacgataaacgtgtgctcgaaatctttagcgagtatgttacctggaatcgcgtcagtaacgtactgtcacatattggctcagtgaccgcaaaagattttgggcgtgttatgggtctgacgatgaaagacatcattaatgaagcagcacgcgaaggccatgatatggctttcgctgataacccgtcggcggtgaagaaagagctgacccgcctcatccagaacacgattcgttccaaatggcacgaagttctggag

SEQ ID NO: 242 - protein, 346 aa, synthetic construct
  REGION 1..346: note = Engineered RNA ligase variants
MHHHHHHGGSGMFAMYSSLENHYNNKFIEKIRGAGFDMHTVEWVAREKIHGTNFSVIITPTEIVPAKRTGPILEGESFFGHEIIMKKYKDSFVKVQNMLNAMDLVSVQIFGEFAGGGIQKGVDYGDKDFYVFDILSDSGNEKVYWDDYVVESFCTTLGLKLAPLLGRGSFAELSQYPNDFKSIVNRYNELVDTTDLEHANKHVFGPQASSETGVAEGYVLKPVNPKFFNNGTRVAIKCKNSKFSEKAKSDKPIKAKVELTENDKRVLEIFSEYVTWNRVSNVLSHIGSVTAKDFGRVMGLTMKDIINEAAREGHDMAFADNPSAVKKELTRLIQNTIRSKWHEVLE

SEQ ID NO: 243 - DNA, 1038 bp, synthetic construct
  misc_feature 1..1038: note = Engineered RNA ligase variants
  source 1..1038: mol_type = other DNA
atgcatcaccatcaccatcacggtggcagcggtatgtttgcgatgtattcaagtctggaaaaccattacaataataagttcattgagaagatccgtctggcaggcttcgatatgcacaccgtggaatgggtagctcgcgagaagattcatggaacgaactttagcgttatcattactccgaccgaaatcgtcccagccaaacgcacagggccgatcttggaaggcgagtcgttctttggtcacgaaattatcatgaagaaatataaagactccttcgtgaaggtgcagaacatgctgaatgccatggatcttgttagcgtgcaaatctttggcgaatttgcgggtggtggcattcagaaaggcgtcgattacggagacaaagatttctatgtgtttgacatcctgtctgatagcgggaacgagaaagtttactgggatgactatcgcgtcgaatcgtttgcgaccgggctcggtctgaaattagcgcctctgctgggacgtggtagtttcgctgaactgtcccagtacccaaacgatttcaaaagcattgtgaactattataatgaattggttgatacgacggacctggaacatgccaataaacacgtctttggtccgcaagcgtcttctgaaactggcgtagcagaaggctacgttcttaaacccgtctatccgatcttctttaataatggtacacgcgtggcgattaaatgcaagaactccaaattttcggagaaagccaagagcgacaaaccaattaaagcgaaagtggaactgacggagaacgataaacgtgtgctcgaaatctttagcgagtatgttacctggaatcgcgtcagtaacgtactgtcacatattggctcagtgaccgcaaaagattttgggcgtgttatgggtctgacgatgaaagacatcattaatgaagcagcacgcgaaggccatgatatgctgttcgctgataacccgtcggcggtgaagaaagagctgacctggctcatccagaacacgattcgttccaaatggcacgaagttctggag

SEQ ID NO: 244 - protein, 346 aa, synthetic construct
  REGION 1..346: note = Engineered RNA ligase variants
MHHHHHHGGSGMFAMYSSLENHYNNKFIEKIRLAGFDMHTVEWVAREKIHGTNFSVIITPTEIVPAKRTGPILEGESFFGHEIIMKKYKDSFVKVQNMLNAMDLVSVQIFGEFAGGGIQKGVDYGDKDFYVFDILSDSGNEKVYWDDYRVESFATGLGLKLAPLLGRGSFAELSQYPNDFKSIVNYYNELVDTTDLEHANKHVFGPQASSETGVAEGYVLKPVYPIFFNNGTRVAIKCKNSKFSEKAKSDKPIKAKVELTENDKRVLEIFSEYVTWNRVSNVLSHIGSVTAKDFGRVMGLTMKDIINEAAREGHDMLFADNPSAVKKELTWLIQNTIRSKWHEVLE

SEQ ID NO: 245 - DNA, 1038 bp, synthetic construct
  misc_feature 1..1038: note = Engineered RNA ligase variants
  source 1..1038: mol_type = other DNA
atgcatcaccatcaccatcacggtggcagcggtatgtttgcggaatattcaagtctggaaaaccattacaataataagttcattgagaagatccgtggggcaggcttcgatatgcacaccgtggaatgggtagctcgcgagaagattcatggaacgaactttagcgttatcattactccgaccgaaatcgtcccagccaaacgcacagggccgatcttggaaggcgagtcgttctttggtcacgaaattatcatgaaaaaatataaagactccttcgtgaaggtgcagaacatgctgaatgccatggatcttgttagcgtgcaaatctttggcgaatttgcgggtggtggcattcagaaaggcgtcgattacggagacaaagatttctatgtgtttgacatcctgtctgatagcgggaacgagaaagtttactgggatgactatgtcgtcgaatcgtttgcgaccgggctcggtctgaaattagcgcctctgctgggacgtggtagtttcgctgaactgtcccagtacccaaacgatttcaaaagcattgtgaaccgttataatgaattggttgatacgacggacctggaacatgccaataaacacgtctttggtccgcaagcgtcttctgaaactggcgtagcagaaggctacgttcttaaacccgtctatccgatcttctttaataatggtacacgcgtggcgattaaatgcaagaactccaaattttcggagaaagccaagagcgacaaaccaattaaagcgaaagtggaactgacggagaacgataaacgtgtgctcgaaatctttagcgagtatgttacctggaatcgcgtcagtaacgtactgtcacatattggctcagtgaccgcaaaagattttgggcgtgttatgggtctgacgatgaaagacatcattaatgaagcagcacgcgaaggccatgatatggctttcgctgataacccgtcggcggtgaagaaagagctgacccgcctcatccagaacacgattcgttccaaatggcacgaagttctggag

SEQ ID NO: 246 - protein, 346 aa, synthetic construct
  REGION 1..346: note = Engineered RNA ligase variants
MHHHHHHGGSGMFAEYSSLENHYNNKFIEKIRGAGFDMHTVEWVAREKIHGTNFSVIITPTEIVPAKRTGPILEGESFFGHEIIMKKYKDSFVKVQNMLNAMDLVSVQIFGEFAGGGIQKGVDYGDKDFYVFDILSDSGNEKVYWDDYVVESFATGLGLKLAPLLGRGSFAELSQYPNDFKSIVNRYNELVDTTDLEHANKHVFGPQASSETGVAEGYVLKPVYPIFFNNGTRVAIKCKNSKFSEKAKSDKPIKAKVELTENDKRVLEIFSEYVTWNRVSNVLSHIGSVTAKDFGRVMGLTMKDIINEAAREGHDMAFADNPSAVKKELTRLIQNTIRSKWHEVLE

SEQ ID NO: 247 - DNA, 1038 bp, synthetic construct
  misc_feature 1..1038: note = Engineered RNA ligase variants
  source 1..1038: mol_type = other DNA
atgcatcaccatcaccatcacggtggcagcggtatgtttgcgtattattcaagtctggaaaaccattacaataataagttcattgagaagatccgtctggcaggcttcgatatgcacaccgtggaatgggtagctcgcgagaagattcatggaacgaactttagcgttatcattactccgaccgaaatcgtcccagccaaacgcacagggccgatcttggaaggcgagtcgttctttggtcacgaaattatcatgaaaaaatataaagactccttcgtgaaggtgcagaacatgctgaatgccatggatcttgttagcgtgcaaatctttggcgaatttgcgggtggtggcattcagaaaggcgtcgattacggagacaaagatttctatgtgtttgacatcctgtctgatagcgggaacgagaaagtttactgggatgactatcgcgtcgaatcgtttgcgaccgggctcggtctgaaattagcgcctctgctgggacgtggtagtttcgctgaactgtcccagtacccaaacgatttcaaaagcattgtgaaccgttataatgaattggttgatacgacggacctggaacatgccaataaacacgtctttggtccgcaagcgtcttctgaaactggcgtagcagaaggctacgttcttaaacccgtctatccgaagttctttaataatggtacacgcgtggcgattaaatgcaagaactccaaattttcggagaaagccaagagcgacaaaccaattaaagcgaaagtggaactgacggagaacgataaacgtgtgctcgaaatctttagcgagtatgttacctggaatcgcgtcagtaacgtactgtcacatattggctcagtgaccgcaaaagattttgggcgtgttatgggtctgacgatgaaagacatcattaatgaagcagcacgcgaaggccatgatatgttgttcgctgataacccgtcggcggtgaagaaagagctgacccgcctcatccagaacacgattcgttccaaatggcacgaagttctggag

SEQ ID NO: 248 - protein, 346 aa, synthetic construct
  REGION 1..346: note = Engineered RNA ligase variants
MHHHHHHGGSGMFAYYSSLENHYNNKFIEKIRLAGFDMHTVEWVAREKIHGTNFSVIITPTEIVPAKRTGPILEGESFFGHEIIMKKYKDSFVKVQNMLNAMDLVSVQIFGEFAGGGIQKGVDYGDKDFYVFDILSDSGNEKVYWDDYRVESFATGLGLKLAPLLGRGSFAELSQYPNDFKSIVNRYNELVDTTDLEHANKHVFGPQASSETGVAEGYVLKPVYPKFFNNGTRVAIKCKNSKFSEKAKSDKPIKAKVELTENDKRVLEIFSEYVTWNRVSNVLSHIGSVTAKDFGRVMGLTMKDIINEAAREGHDMLFADNPSAVKKELTRLIQNTIRSKWHEVLE

SEQ ID NO: 249 - DNA, 1038 bp, synthetic construct
  misc_feature 1..1038: note = Engineered RNA ligase variants
  source 1..1038: mol_type = other DNA
atgcatcaccatcaccatcacggtggcagcggtatgtttgcgaaatattcaagtctggaaaaccattacaataataagttcattgagaagatccgtggtgcaggcttcgatatgcacaccgtggaatgggtagctcgcgagaagattcatggaacgaactttagcgttatcattactccgaccgaaatcgtcccagccaaacgcacagggccgatcttggaaggcgagtcgttctttggtcacgaaattatcatgaagaaatataaagactccttcgtgaaggtgcagaacatgctgaatgccatggatcttgttagcgtgcaaatctttggcgaatttgcgggtggtggcattcagaaaggcgtcgattacggagacaaagatttctatgtgtttgacatcctgtctgatagcgggaacgagaaagtttactgggatgactatgtagtcgaatcgtttgcaaccggcctcggtctgaaattagcgcctctgctgggacgtggtagtttcgctgaactgtcccagtacccaaacgatttcaaaagcattgtgaactattataatgaattggttgatacgacgggcctggaacatgccaataaacacgtctttggtccgcaagcgtcttctgaaactggcgtagcagaaggctacgttcttaaacccgtctatccgaagttctttaataatggtacacgcgtggcgattaaatgcaagaactccaaattttcggagaaagccaagagcgacaaaccaattaaagcgaaagtggaactgacggagaacgataaacgtgtgctcgaaatctttagcgagtatgttacctggaatcgcgtcagtaacgtactgtcacatattggctcagtgaccgcaaaagattttgggcgtgttatgggtctgacgatgaaagacatcattaatgaagcagcacgcgaaggccatgatatgttgttcgctgataacccgtcggcggtgaagaaagagctgacccgcctcatccagaacacgattcgttccaaatggcacgaagttctggag

SEQ ID NO: 250 - protein, 346 aa, synthetic construct
  REGION 1..346: note = Engineered RNA ligase variants
MHHHHHHGGSGMFAKYSSLENHYNNKFIEKIRGAGFDMHTVEWVAREKIHGTNFSVIITPTEIVPAKRTGPILEGESFFGHEIIMKKYKDSFVKVQNMLNAMDLVSVQIFGEFAGGGIQKGVDYGDKDFYVFDILSDSGNEKVYWDDYVVESFATGLGLKLAPLLGRGSFAELSQYPNDFKSIVNYYNELVDTTGLEHANKHVFGPQASSETGVAEGYVLKPVYPKFFNNGTRVAIKCKNSKFSEKAKSDKPIKAKVELTENDKRVLEIFSEYVTWNRVSNVLSHIGSVTAKDFGRVMGLTMKDIINEAAREGHDMLFADNPSAVKKELTRLIQNTIRSKWHEVLE

SEQ ID NO: 251 - DNA, 1038 bp, synthetic construct
  misc_feature 1..1038: note = Engineered RNA ligase variants
  source 1..1038: mol_type = other DNA
atgcatcaccatcaccatcacggtggcagcggtatgtttgcgccgtattcaagtctggaaaaccattacaataataagttcattgagaagatccgtggggcaggcttcgatatgcacaccgtggaatgggtagctcgcgagaagattcatggaacgaactttagcgttatcattactccgaccgaaatcgtcccagccaaacgcacagggccgatcttggaaggcgagtcgttctttggtcacgaaattatcatgggcaaatataaagactccttcgtgaaggtgcagaacatgctgaatgccatggatcttgttagcgtgcaaatctttggcgaatttgcgggtggtggcattcagaaaggcgtcgattacggagacaaagatttctatgtgtttgacatcctgtctgatagcgggaacgagaaagtttactgggatgactatgtcgtcgaatcgtttgcgaccacgctcggtctgaaattagcgcctctgctgggacgtggtagtttcgctgaactgtcccagtacccaaacgatttcaaaagcattgtgaaccgttataatgaattggttgatacgacgggcctggaacatgccaataaacacgtctttggtccgcaagcgtcttctgaaactggcgtagcagaaggctacgttcttaaacccgtcaatccgatcttctttaataatggtacacgcgtggcgattaaatgcaagaactccaaattttcggagaaagccaagagcgacaaaccaattaaagcgaaagtggaactgacggagaacgataaacgtgtgctcgaaatctttagcgagtatgttacctggaatcgcgtcagtaacgtactgtcacatattggctcagtgaccgcaaaagattttgggcgtgttatgggtctgacgatgaaagacatcattaatgaagcagcacgcgaaggccatgatatggctttcgctgataacccgtcggcggtgaagaaagagctgaccctgctcatccagaacacgattcgttccaaatggcacgaagttctggag

SEQ ID NO: 252 - protein, 346 aa, synthetic construct
  REGION 1..346: note = Engineered RNA ligase variants
MHHHHHHGGSGMFAPYSSLENHYNNKFIEKIRGAGFDMHTVEWVAREKIHGTNFSVIITPTEIVPAKRTGPILEGESFFGHEIIMGKYKDSFVKVQNMLNAMDLVSVQIFGEFAGGGIQKGVDYGDKDFYVFDILSDSGNEKVYWDDYVVESFATTLGLKLAPLLGRGSFAELSQYPNDFKSIVNRYNELVDTTGLEHANKHVFGPQASSETGVAEGYVLKPVNPIFFNNGTRVAIKCKNSKFSEKAKSDKPIKAKVELTENDKRVLEIFSEYVTWNRVSNVLSHIGSVTAKDFGRVMGLTMKDIINEAAREGHDMAFADNPSAVKKELTLLIQNTIRSKWHEVLE

SEQ ID NO: 253 - DNA, 1038 bp, synthetic construct
  misc_feature 1..1038: note = Engineered RNA ligase variants
  source 1..1038: mol_type = other DNA
atgcatcaccatcaccatcacggtggcagcggtatgtttgcgatgtattcaagtctggaaaaccattacaataataagttcattgagaagatccgtggtgcaggcttcgatatgcacaccgtggaatgggtagctcgcgagaagattcatggaacgaactttagcgttatcattactccgaccgaaatcgtcccagccaaacgcacagggccgatcttggaaggcgagtcgttctttggtcacgaaattatcatgaaaaaatataaagactccttcgtgaaggtgcagaacatgctgaatgccatggatcttgttagcgtgcaaatctttggcgaatttgcgggtggtggcattcagaaaggcgtcgattacggagacaaagatttctatgtgtttgacatcctgtctgatagcgggaacgagaaagtttactgggatgactatgtagtcgaatcgtttgcaaccggcctcggtctgaaattagcgcctctgctgggacgtggtagtttcgctgaactgtcccagtacccaaacgatttcaaaagcattgtgaactattataatgaattggttgatacgacgggcctggaacatgccaataaacacgtctttggtccgcaagcgtcttctgaaactggcgtagcagaaggctacgttcttaaacccgtcaatccgatcttctttaataatggtacacgcgtggcgattaaatgcaagaactccaaattttcggagaaagccaagagcgacaaaccaattaaagcgaaagtggaactgacggagaacgataaacgtgtgctcgaaatctttagcgagtatgttacctggaatcgcgtcagtaacgtactgtcacatattggctcagtgaccgcaaaagattttgggcgtgttatgggtctgacgatgaaagacatcattaatgaagcagcacgcgaaggccatgatatgttgttcgctgataacccgtcggcggtgaagaaagagctgacctggctcatccagaacacgattcgttccaaatggcacgaagttctggag

SEQ ID NO: 254 - protein, 346 aa, synthetic construct
  REGION 1..346: note = Engineered RNA ligase variants
MHHHHHHGGSGMFAMYSSLENHYNNKFIEKIRGAGFDMHTVEWVAREKIHGTNFSVIITPTEIVPAKRTGPILEGESFFGHEIIMKKYKDSFVKVQNMLNAMDLVSVQIFGEFAGGGIQKGVDYGDKDFYVFDILSDSGNEKVYWDDYVVESFATGLGLKLAPLLGRGSFAELSQYPNDFKSIVNYYNELVDTTGLEHANKHVFGPQASSETGVAEGYVLKPVNPIFFNNGTRVAIKCKNSKFSEKAKSDKPIKAKVELTENDKRVLEIFSEYVTWNRVSNVLSHIGSVTAKDFGRVMGLTMKDIINEAAREGHDMLFADNPSAVKKELTWLIQNTIRSKWHEVLE

SEQ ID NO: 255 - DNA, 1038 bp, synthetic construct
  misc_feature 1..1038: note = Engineered RNA ligase variants
  source 1..1038: mol_type = other DNA
atgcatcaccatcaccatcacggtggcagcggtatgtttgcgaaatattcaagtctggaaaaccattacaataataagttcattgagaagatccgtggggcaggcttcgatatgcacaccgtggaatgggtagctcgcgagaagattcatggaacgaactttagcgttatcattactccgaccgaaatcgtcccagccaaacgcacagggccgatcttggaaggcgagtcgttctttggtcacgaaattatcatgaagaaatataaagactccttcgtgaaggtgcagaacatgctgaatgccatggatcttgttagcgtgcaaatctttggcgaatttgcgggtggtggcattcagaaaggcgtcgattacggagacaaagatttctatgtgtttgacatcctgtctgatagcgggaacgagaaagtttactgggatgactatgtcgtcgaatcgtttgcgaccacgctcggtctgaaattagcgcctctgctgggacgtggtagtttcgctgaactgtcccagtacccaaacgatttcaaaagcattgtgaaccgttataatgaattggttgatacgacggacctggaacatgccaataaacacgtctttggtccgcaagcgtcttctgaaactggcgtagcagaaggctacgttcttaaacccgtctatccgatcttctttaataatggtacacgcgtggcgattaaatgcaagaactccaaattttcggagaaagccaagagcgacaaaccaattaaagcgaaagtggaactgacggagaacgataaacgtgtgctcgaaatctttagcgagtatgttacctggaatcgcgtcagtaacgtactgtcacatattggctcagtgaccgcaaaagattttgggcgtgttatgggtctgacgatgaaagacatcattaatgaagcagcacgcgaaggccatgatatgctgttcgctgataacccgtcggcggtgaagaaagagctgacccgcctcatccagaacacgattcgttccaaatggcacgaagttctggag

SEQ ID NO: 256 - protein, 346 aa, synthetic construct
  REGION 1..346: note = Engineered RNA ligase variants
MHHHHHHGGSGMFAKYSSLENHYNNKFIEKIRGAGFDMHTVEWVAREKIHGTNFSVIITPTEIVPAKRTGPILEGESFFGHEIIMKKYKDSFVKVQNMLNAMDLVSVQIFGEFAGGGIQKGVDYGDKDFYVFDILSDSGNEKVYWDDYVVESFATTLGLKLAPLLGRGSFAELSQYPNDFKSIVNRYNELVDTTDLEHANKHVFGPQASSETGVAEGYVLKPVYPIFFNNGTRVAIKCKNSKFSEKAKSDKPIKAKVELTENDKRVLEIFSEYVTWNRVSNVLSHIGSVTAKDFGRVMGLTMKDIINEAAREGHDMLFADNPSAVKKELTRLIQNTIRSKWHEVLE

SEQ ID NO: 257 - DNA, 1038 bp, synthetic construct
  misc_feature 1..1038: note = Engineered RNA ligase variants
  source 1..1038: mol_type = other DNA
atgcatcaccatcaccatcacggtggcagcggtatgtttgcgtattattcaagtctggaaaaccattacaataataagttcattgagaagatccgtggggcaggcttcgatatgcacaccgtggaatgggtagctcgcgagaagattcatggaacgaactttagcgttatcattactccgaccgaaatcgtcccagccaaacgcacagggccgatcttggaaggcgagtcgttctttggtcacgaaattatcatgaagaaatataaagactccttcgtgaaggtgcagaacatgctgaatgccatggatcttgttagcgtgcaaatctttggcgaatttgcgggtggtggcattcagaaaggcgtcgattacggagacaaagatttctatgtgtttgacatcctgtctgatagcgggaacgagaaagtttactgggatgactatcgcgtcgaatcgttttgcaccacgctcggtctgaaattagcgcctctgctgggacgtggtagtttcgctgaactgtcccagtacccaaacgatttcaaaagcattgtgaactattataatgaattggttgatacgacggacctggaacatgccaataaacacgtctttggtccgcaagcgtcttctgaaactggcgtagcagaaggctacgttcttaaacccgtctatccgatcttctttaataatggtacacgcgtggcgattaaatgcaagaactccaaattttcggagaaagccaagagcgacaaaccaattaaagcgaaagtggaactgacggagaacgataaacgtgtgctcgaaatctttagcgagtatgttacctggaatcgcgtcagtaacgtactgtcacatattggctcagtgaccgcaaaagattttgggcgtgttatgggtctgacgatgaaagacatcattaatgaagcagcacgcgaaggccatgatatgctgttcgctgataacccgtcggcggtgaagaaagagctgaccattctcatccagaacacgattcgttccaaatggcacgaagttctggag

SEQ ID NO: 258 - protein, 346 aa, synthetic construct
  REGION 1..346: note = Engineered RNA ligase variants
MHHHHHHGGSGMFAYYSSLENHYNNKFIEKIRGAGFDMHTVEWVAREKIHGTNFSVIITPTEIVPAKRTGPILEGESFFGHEIIMKKYKDSFVKVQNMLNAMDLVSVQIFGEFAGGGIQKGVDYGDKDFYVFDILSDSGNEKVYWDDYRVESFCTTLGLKLAPLLGRGSFAELSQYPNDFKSIVNYYNELVDTTDLEHANKHVFGPQASSETGVAEGYVLKPVYPIFFNNGTRVAIKCKNSKFSEKAKSDKPIKAKVELTENDKRVLEIFSEYVTWNRVSNVLSHIGSVTAKDFGRVMGLTMKDIINEAAREGHDMLFADNPSAVKKELTILIQNTIRSKWHEVLE

SEQ ID NO: 259 - DNA, 1038 bp, synthetic construct
  misc_feature 1..1038: note = Engineered RNA ligase variants
  source 1..1038: mol_type = other DNA
atgcatcaccatcaccatcacggtggcagcggtatgtttgcgaaatattcaagtctggaaaaccattacaataataagttcattgagaagatccgtctggcaggcttcgatatgcacaccgtggaatgggtagctcgcgagaagattcatggaacgaactttagcgttatcattactccgaccgaaatcgtcccagccaaacgcacagggccgatcttggaaggcgagtcgttctttggtcacgaaattatcatgaagaaatataaagactccttcgtgaaggtgcagaacatgctgaatgccatggatcttgttagcgtgcaaatctttggcgaatttgcgggtggtggcattcagaaaggcgtcgattacggagacaaagatttctatgtgtttgacatcctgtctgatagcgggaacgagaaagtttactgggatgactatgtcgtcgaatcgtttgcgaccacgctcggtctgaaattagcgcctctgctgggacgtggtagtttcgctgaactgtcccagtacccaaacgatttcaaaagcattgtgaaccgttataatgaattggttgatacgacgggcctggaacatgccaataaacacgtctttggtccgcaagcgtcttctgaaactggcgtagcagaaggctacgttcttaaacccgtcaatccgaagttctttaataatggtacacgcgtggcgattaaatgcaagaactccaaattttcggagaaagccaagagcgacaaaccaattaaagcgaaagtggaactgacggagaacgataaacgtgtgctcgaaatctttagcgagtatgttacctggaatcgcgtcagtaacgtactgtcacatattggctcagtgaccgcaaaagattttgggcgtgttatgggtctgacgatgaaagacatcattaatgaagcagcacgcgaaggccatgatatgctgttcgctgataacccgtcggcggtgaagaaagagctgaccctgctcatccagaacacgattcgttccaaatggcacgaagttctggag

SEQ ID NO: 260 - protein, 346 aa, synthetic construct
  REGION 1..346: note = Engineered RNA ligase variants
MHHHHHHGGSGMFAKYSSLENHYNNKFIEKIRLAGFDMHTVEWVAREKIHGTNFSVIITPTEIVPAKRTGPILEGESFFGHEIIMKKYKDSFVKVQNMLNAMDLVSVQIFGEFAGGGIQKGVDYGDKDFYVFDILSDSGNEKVYWDDYVVESFATTLGLKLAPLLGRGSFAELSQYPNDFKSIVNRYNELVDTTGLEHANKHVFGPQASSETGVAEGYVLKPVNPKFFNNGTRVAIKCKNSKFSEKAKSDKPIKAKVELTENDKRVLEIFSEYVTWNRVSNVLSHIGSVTAKDFGRVMGLTMKDIINEAAREGHDMLFADNPSAVKKELTLLIQNTIRSKWHEVLE

SEQ ID NO: 261 - DNA, 1038 bp, synthetic construct
  misc_feature 1..1038: note = Engineered RNA ligase variants
  source 1..1038: mol_type = other DNA
atgcatcaccatcaccatcacggtggcagcggtatgtttgcgccgtattcaagtctggaaaaccattacaataataagttcattgagaagatccgtggggcaggcttcgatatgcacaccgtggaatgggtagctcgcgagaagattcatggaacgaactttagcgttatcattactccgaccgaaatcgtcccagccaaacgcacagggccgatcttggaaggcgagtcgttctttggtcacgaaattatcatgggcaaatataaagactccttcgtgaaggtgcagaacatgctgaatgccatggatcttgttagcgtgcaaatctttggcgaatttgcgggtggtggcattcagaaaggcgtcgattacggagacaaagatttctatgtgtttgacatcctgtctgatagcgggaacgagaaagtttactgggatgactatcgcgtcgaatcgttttgcaccacgctcggtctgaaattagcgcctctgctgggacgtggtagtttcgctgaactgtcccagtacccaaacgatttcaaaagcattgtgaactactataatgaattggttgatacgacggacctggaacatgccaataaacacgtctttggtccgcaagcgtcttctgaaactggcgtagcagaaggctacgttcttaaacccgtcaacccgaaattctttaataatggtacacgcgtggcgattaaatgcaagaactccaaattttcggagaaagccaagagcgacaaaccaattaaagcgaaagtggaactgacggagaacgataaacgtgtgctcgaaatctttagcgagtatgttacctggaatcgcgtcagtaacgtactgtcacatattggctcagtgaccgcaaaagattttgggcgtgttatgggtctgacgatgaaagacatcattaatgaagcagcacgcgaaggccatgatatggctttcgctgataacccgtcggcggtgaagaaagagctgacccgcctcatccagaacacgattcgttccaaatggcacgaagttctggag

SEQ ID NO: 262 - protein, 346 aa, synthetic construct
  REGION 1..346: note = Engineered RNA ligase variants
MHHHHHHGGSGMFAPYSSLENHYNNKFIEKIRGAGFDMHTVEWVAREKIHGTNFSVIITPTEIVPAKRTGPILEGESFFGHEIIMGKYKDSFVKVQNMLNAMDLVSVQIFGEFAGGGIQKGVDYGDKDFYVFDILSDSGNEKVYWDDYRVESFCTTLGLKLAPLLGRGSFAELSQYPNDFKSIVNYYNELVDTTDLEHANKHVFGPQASSETGVAEGYVLKPVNPKFFNNGTRVAIKCKNSKFSEKAKSDKPIKAKVELTENDKRVLEIFSEYVTWNRVSNVLSHIGSVTAKDFGRVMGLTMKDIINEAAREGHDMAFADNPSAVKKELTRLIQNTIRSKWHEVLE

SEQ ID NO: 263 - DNA, 1038 bp, synthetic construct
  misc_feature 1..1038: note = Engineered RNA ligase variants
  source 1..1038: mol_type = other DNA
atgcatcaccatcaccatcacggtggcagcggtatgtttgcgatgtattcaagtctggaaaaccattacaataataagttcattgagaagatccgtggtgcaggcttcgatatgcacaccgtggaatgggtagctcgcgagaagattcatggaacgaactttagcgttatcattactccgaccgaaatcgtcccagccaaacgcacagggccgatcttggaaggcgagtcgttctttggtcacgaaattatcatgaaaaaatataaagactccttcgtgaaggtgcagaacatgctgaatgccatggatcttgttagcgtgcaaatctttggcgaatttgcgggtggtggcattcagaaaggcgtcgattacggagacaaagatttctatgtgtttgacatcctgtctgatagcgggaacgagaaagtttactgggatgactatgtagtcgaatcgtttgcaaccggcctcggtctgaaattagcgcctctgctgggacgtggtagtttcgctgaactgtcccagtacccaaacgatttcaaaagcattgtgaacgactataatgaattggttgatacgacggacctggaacatgccaataaacacgtctttggtccgcaagcgtcttctgaaactggcgtagcagaaggctacgttcttaaacccgtcaacccgaaattctttaataatggtacacgcgtggcgattaaatgcaagaactccaaattttcggagaaagccaagagcgacaaaccaattaaagcgaaagtggaactgacggagaacgataaacgtgtgctcgaaatctttagcgagtatgttacctggaatcgcgtcagtaacgtactgtcacatattggctcagtgaccgcaaaagattttgggcgtgttatgggtctgacgatgaaagacatcattaatgaagcagcacgcgaaggccatgatatggctttcgctgataacccgtcggcggtgaagaaagagctgacccgcctcatccagaacacgattcgttccaaatggcacgaagttctggag

SEQ ID NO: 264 - protein, 346 aa, synthetic construct
  REGION 1..346: note = Engineered RNA ligase variants
MHHHHHHGGSGMFAMYSSLENHYNNKFIEKIRGAGFDMHTVEWVAREKIHGTNFSVIITPTEIVPAKRTGPILEGESFFGHEIIMKKYKDSFVKVQNMLNAMDLVSVQIFGEFAGGGIQKGVDYGDKDFYVFDILSDSGNEKVYWDDYVVESFATGLGLKLAPLLGRGSFAELSQYPNDFKSIVNDYNELVDTTDLEHANKHVFGPQASSETGVAEGYVLKPVNPKFFNNGTRVAIKCKNSKFSEKAKSDKPIKAKVELTENDKRVLEIFSEYVTWNRVSNVLSHIGSVTAKDFGRVMGLTMKDIINEAAREGHDMAFADNPSAVKKELTRLIQNTIRSKWHEVLE

SEQ ID NO: 265 - DNA, 1038 bp, synthetic construct
  misc_feature 1..1038: note = Engineered RNA ligase variants
  source 1..1038: mol_type = other DNA
atgcatcaccatcaccatcacggtggcagcggtatgtttgcgccgtattcaagtctggaaaaccattacaataataagttcattgagaagatccgtggggcaggcttcgatatgcacaccgtggaatgggtagctcgcgagaagattcatggaacgaactttagcgttatcattactccgaccgaaatcgtcccagccaaacgcacagggccgatcttggaaggcgagtcgttctttggtcacgaaattatcatgggcaaatataaagactccttcgtgaaggtgcagaacatgctgaatgccatggatcttgttagcgtgcaaatctttggcgaatttgcgggtggtggcattcagaaaggcgtcgattacggagacaaagatttctatgtgtttgacatcctgtctgatagcgggaacgagaaagtttactgggatgactatcgcgtcgaatcgttttgcaccgggctcggtctgaaattagcgcctctgctgggacgtggtagtttcgctgaactgtcccagtacccaaacgatttcaaaagcattgtgaactactataatgaattggttgatacgacgggcctggaacatgccaataaacacgtctttggtccgcaagcgtcttctgaaactggcgtagcagaaggctacgttcttaaacccgtcaatccgaagttctttaataatggtacacgcgtggcgattaaatgcaagaactccaaattttcggagaaagccaagagcgacaaaccaattaaagcgaaagtggaactgacggagaacgataaacgtgtgctcgaaatctttagcgagtatgttacctggaatcgcgtcagtaacgtactgtcacatattggctcagtgaccgcaaaagattttgggcgtgttatgggtctgacgatgaaagacatcattaatgaagcagcacgcgaaggccatgatatgctgttcgctgataacccgtcggcggtgaagaaagagctgaccctgctcatccagaacacgattcgttccaaatggcacgaagttctggag

SEQ ID NO: 266 - protein, 346 aa, synthetic construct
  REGION 1..346: note = Engineered RNA ligase variants
MHHHHHHGGSGMFAPYSSLENHYNNKFIEKIRGAGFDMHTVEWVAREKIHGTNFSVIITPTEIVPAKRTGPILEGESFFGHEIIMGKYKDSFVKVQNMLNAMDLVSVQIFGEFAGGGIQKGVDYGDKDFYVFDILSDSGNEKVYWDDYRVESFCTGLGLKLAPLLGRGSFAELSQYPNDFKSIVNYYNELVDTTGLEHANKHVFGPQASSETGVAEGYVLKPVNPKFFNNGTRVAIKCKNSKFSEKAKSDKPIKAKVELTENDKRVLEIFSEYVTWNRVSNVLSHIGSVTAKDFGRVMGLTMKDIINEAAREGHDMLFADNPSAVKKELTLLIQNTIRSKWHEVLE

SEQ ID NO: 267 - DNA, 1038 bp, synthetic construct
  misc_feature 1..1038: note = Engineered RNA ligase variants
  source 1..1038: mol_type = other DNA
atgcatcaccatcaccatcacggtggcagcggtatgtttgcgtattattcaagtctggaaaaccattacaataataagttcattgagaagatccgtctggcaggcttcgatatgcacaccgtggaatgggtagctcgcgagaagattcatggaacgaactttagcgttatcattactccgaccgaaatcgtcccagccaaacgcacagggccgatcttggaaggcgagtcgttctttggtcacgaaattatcatgaagaaatataaagactccttcgtgaaggtgcagaacatgctgaatgccatggatcttgttagcgtgcaaatctttggcgaatttgcgggtggtggcattcagaaaggcgtcgattacggagacaaagatttctatgtgtttgacatcctgtctgatagcgggaacgagaaagtttactgggatgactatactgtcgaatcgttttgcaccacgctcggtctgaaattagcgcctctgctgggacgtggtagtttcgctgaactgtcccagtacccaaacgatttcaaaagcattgtgaactattataatgaattggttgatacgacggacctggaacatgccaataaacacgtctttggtccgcaagcgtcttctgaaactggcgtagcagaaggctacgttcttaaacccgtcaatccgatcttctttaataatggtacacgcgtggcgattaaatgcaagaactccaaattttcggagaaagccaagagcgacaaaccaattaaagcgaaagtggaactgacggagaacgataaacgtgtgctcgaaatctttagcgagtatgttacctggaatcgcgtcagtaacgtactgtcacatattggctcagtgaccgcaaaagattttgggcgtgttatgggtctgacgatgaaagacatcattaatgaagcagcacgcgaaggccatgatatgctgttcgctgataacccgtcggcggtgaagaaagagctgaccattctcatccagaacacgattcgttccaaatggcacgaagttctggag

SEQ ID NO: 268 - protein, 346 aa, synthetic construct
  REGION 1..346: note = Engineered RNA ligase variants
MHHHHHHGGSGMFAYYSSLENHYNNKFIEKIRLAGFDMHTVEWVAREKIHGTNFSVIITPTEIVPAKRTGPILEGESFFGHEIIMKKYKDSFVKVQNMLNAMDLVSVQIFGEFAGGGIQKGVDYGDKDFYVFDILSDSGNEKVYWDDYTVESFCTTLGLKLAPLLGRGSFAELSQYPNDFKSIVNYYNELVDTTDLEHANKHVFGPQASSETGVAEGYVLKPVNPIFFNNGTRVAIKCKNSKFSEKAKSDKPIKAKVELTENDKRVLEIFSEYVTWNRVSNVLSHIGSVTAKDFGRVMGLTMKDIINEAAREGHDMLFADNPSAVKKELTILIQNTIRSKWHEVLE

SEQ ID NO: 269 - DNA, 1038 bp, synthetic construct
  misc_feature 1..1038: note = Engineered RNA ligase variants
  source 1..1038: mol_type = other DNA
atgcatcaccatcaccatcacggtggcagcggtatgtttgcgccgtattcaagtctggaaaaccattacaataataagttcattgagaagatccgtggggcaggcttcgatatgcacaccgtggaatgggtagctcgcgagaagattcatggaacgaactttagcgttatcattactccgaccgaaatcgtcccagccaaacgcacagggccgatcttggaaggcgagtcgttctttggtcacgaaattatcatgaaaaaatataaagactccttcgtgaaggtgcagaacatgctgaatgccatggatcttgttagcgtgcaaatctttggcgaatttgcgggtggtggcattcagaaaggcgtcgattacggagacaaagatttctatgtgtttgacatcctgtctgatagcgggaacgagaaagtttactgggatgactatcgcgtcgaatcgttttgcaccgggctcggtctgaaattagcgcctctgctgggacgtggtagtttcgctgaactgtcccagtacccaaacgatttcaaaagcattgtgaaccgttataatgaattggttgatacgacggacctggaacatgccaataaacacgtctttggtccgcaagcgtcttctgaaactggcgtagcagaaggctacgttcttaaacccgtcaacccgaaattctttaataatggtacacgcgtggcgattaaatgcaagaactccaaattttcggagaaagccaagagcgacaaaccaattaaagcgaaagtggaactgacggagaacgataaacgtgtgctcgaaatctttagcgagtatgttacctggaatcgcgtcagtaacgtactgtcacatattggctcagtgaccgcaaaagattttgggcgtgttatgggtctgacgatgaaagacatcattaatgaagcagcacgcgaaggccatgatatggctttcgctgataacccgtcggcggtgaagaaagagctgaccctgctcatccagaacacgattcgttccaaatggcacgaagttctggag

SEQ ID NO: 270 - protein, 346 aa, synthetic construct
  REGION 1..346: note = Engineered RNA ligase variants
MHHHHHHGGSGMFAPYSSLENHYNNKFIEKIRGAGFDMHTVEWVAREKIHGTNFSVIITPTEIVPAKRTGPILEGESFFGHEIIMKKYKDSFVKVQNMLNAMDLVSVQIFGEFAGGGIQKGVDYGDKDFYVFDILSDSGNEKVYWDDYRVESFCTGLGLKLAPLLGRGSFAELSQYPNDFKSIVNRYNELVDTTDLEHANKHVFGPQASSETGVAEGYVLKPVNPKFFNNGTRVAIKCKNSKFSEKAKSDKPIKAKVELTENDKRVLEIFSEYVTWNRVSNVLSHIGSVTAKDFGRVMGLTMKDIINEAAREGHDMAFADNPSAVKKELTLLIQNTIRSKWHEVLE

SEQ ID NO: 271 - DNA, 1038 bp, synthetic construct
  misc_feature 1..1038: note = Engineered RNA ligase variants
  source 1..1038: mol_type = other DNA
atgcatcaccatcaccatcacggtggcagcggtatgtttgcgaaatattcaagtctggaaaaccattacaataataagttcattgagaagatccgtggggcaggcttcgatatgcacaccgtggaatgggtagctcgcgagaagattcatggaacgaactttagcgttatcattactccgaccgaaatcgtcccagccaaacgcacagggccgatcttggaaggcgagtcgttctttggtcacgaaattatcatgaagaaatataaagactccttcgtgaaggtgcagaacatgctgaatgccatggatcttgttagcgtgcaaatctttggcgaatttgcgggtggtggcattcagaaaggcgtcgattacggagacaaagatttctatgtgtttgacatcctgtctgatagcgggaacgagaaagtttactgggatgactatgtagtcgaatcgtttgcaaccggcctcggtctgaaattagcgcctctgctgggacgtggtagtttcgctgaactgtcccagtacccaaacgatttcaaaagcattgtgaactattataatgaattggttgatacgacgggcctggaacatgccaataaacacgtctttggtccgcaagcgtcttctgaaactggcgtagcagaaggctacgttcttaaacccgtcaacccgaaattctttaataatggtacacgcgtggcgattaaatgcaagaactccaaattttcggagaaagccaagagcgacaaaccaattaaagcgaaagtggaactgacggagaacgataaacgtgtgctcgaaatctttagcgagtatgttacctggaatcgcgtcagtaacgtactgtcacatattggctcagtgaccgcaaaagattttgggcgtgttatgggtctgacgatgaaagacatcattaatgaagcagcacgcgaaggccatgatatgttgttcgctgataacccgtcggcggtgaagaaagagctgacccgcctcatccagaacacgattcgttccaaatggcacgaagttctggag

SEQ ID NO: 272 - protein, 346 aa, synthetic construct
  REGION 1..346: note = Engineered RNA ligase variants
MHHHHHHGGSGMFAKYSSLENHYNNKFIEKIRGAGFDMHTVEWVAREKIHGTNFSVIITPTEIVPAKRTGPILEGESFFGHEIIMKKYKDSFVKVQNMLNAMDLVSVQIFGEFAGGGIQKGVDYGDKDFYVFDILSDSGNEKVYWDDYVVESFATGLGLKLAPLLGRGSFAELSQYPNDFKSIVNYYNELVDTTGLEHANKHVFGPQASSETGVAEGYVLKPVNPKFFNNGTRVAIKCKNSKFSEKAKSDKPIKAKVELTENDKRVLEIFSEYVTWNRVSNVLSHIGSVTAKDFGRVMGLTMKDIINEAAREGHDMLFADNPSAVKKELTRLIQNTIRSKWHEVLE

SEQ ID NO: 273 - DNA, 1038 bp, synthetic construct
  misc_feature 1..1038: note = Engineered RNA ligase variants
  source 1..1038: mol_type = other DNA
atgcatcaccatcaccatcacggtggcagcggtatgtttgcgatgtattcaagtctggaaaaccattacaataataagttcattgagaagatccgtggtgcaggcttcgatatgcacaccgtggaatgggtagctcgcgagaagattcatggaacgaactttagcgttatcattactccgaccgaaatcgtcccagccaaacgcacagggccgatcttggaaggcgagtcgttctttggtcacgaaattatcatgggcaaatataaagactccttcgtgaaggtgcagaacatgctgaatgccatggatcttgttagcgtgcaaatctttggcgaatttgcgggtggtggcattcagaaaggcgtcgattacggagacaaagatttctatgtgtttgacatcctgtctgatagcgggaacgagaaagtttactgggatgactatgtagtcgaatcgtttgcgaccacgctcggtctgaaattagcgcctctgctgggacgtggtagtttcgctgaactgtcccagtacccaaacgatttcaaaagcattgtgaaccgttataatgaattggttgatacgacgggcctggaacatgccaataaacacgtctttggtccgcaagcgtcttctgaaactggcgtagcagaaggctacgttcttaaacccgtcaatccgaagttctttaataatggtacacgcgtggcgattaaatgcaagaactccaaattttcggagaaagccaagagcgacaaaccaattaaagcgaaagtggaactgacggagaacgataaacgtgtgctcgaaatctttagcgagtatgttacctggaatcgcgtcagtaacgtactgtcacatattggctcagtgaccgcaaaagattttgggcgtgttatgggtctgacgatgaaagacatcattaatgaagcagcacgcgaaggccatgatatgctgttcgctgataacccgtcggcggtgaagaaagagctgacctggctcatccagaacacgattcgttccaaatggcacgaagttctggag

SEQ ID NO: 274 - protein, 346 aa, synthetic construct
  REGION 1..346: note = Engineered RNA ligase variants
MHHHHHHGGSGMFAMYSSLENHYNNKFIEKIRGAGFDMHTVEWVAREKIHGTNFSVIITPTEIVPAKRTGPILEGESFFGHEIIMGKYKDSFVKVQNMLNAMDLVSVQIFGEFAGGGIQKGVDYGDKDFYVFDILSDSGNEKVYWDDYVVESFATTLGLKLAPLLGRGSFAELSQYPNDFKSIVNRYNELVDTTGLEHANKHVFGPQASSETGVAEGYVLKPVNPKFFNNGTRVAIKCKNSKFSEKAKSDKPIKAKVELTENDKRVLEIFSEYVTWNRVSNVLSHIGSVTAKDFGRVMGLTMKDIINEAAREGHDMLFADNPSAVKKELTWLIQNTIRSKWHEVLE

SEQ ID NO: 275 - DNA, 1038 bp, synthetic construct
  misc_feature 1..1038: note = Engineered RNA ligase variants
  source 1..1038: mol_type = other DNA
atgcatcaccatcaccatcacggtggcagcggtatgtttgcgaaatattcaagtctggaaaaccattacaataataagttcattgagaagatccgtggggcaggcttcgatatgcacaccgtggaatgggtagctcgcgagaagattcatggaacgaactttagcgttatcattactccgaccgaaatcgtcccagccaaacgcacagggccgatcttggaaggcgagtcgttctttggtcacgaaattatcatgaaaaaatataaagactccttcgtgaaggtgcagaacatgctgaatgccatggatcttgttagcgtgcaaatctttggcgaatttgcgggtggtggcattcagaaaggcgtcgattacggagacaaagatttctatgtgtttgacatcctgtctgatagcgggaacgagaaagtttactgggatgactatcgcgtcgaatcgtttgcgaccacgctcggtctgaaattagcgcctctgctgggacgtggtagtttcgctgaactgtcccagtacccaaacgatttcaaaagcattgtgaactactataatgaattggttgatacgacggacctggaacatgccaataaacacgtctttggtccgcaagcgtcttctgaaactggcgtagcagaaggctacgttcttaaacccgtctatccgatcttctttaataatggtacacgcgtggcgattaaatgcaagaactccaaattttcggagaaagccaagagcgacaaaccaattaaagcgaaagtggaactgacggagaacgataaacgtgtgctcgaaatctttagcgagtatgttacctggaatcgcgtcagtaacgtactgtcacatattggctcagtgaccgcaaaagattttgggcgtgttatgggtctgacgatgaaagacatcattaatgaagcagcacgcgaaggccatgatatgctgttcgctgataacccgtcggcggtgaagaaagagctgacctggctcatccagaacacgattcgttccaaatggcacgaagttctggag

SEQ ID NO: 276 - protein, 346 aa, synthetic construct
  REGION 1..346: note = Engineered RNA ligase variants
MHHHHHHGGSGMFAKYSSLENHYNNKFIEKIRGAGFDMHTVEWVAREKIHGTNFSVIITPTEIVPAKRTGPILEGESFFGHEIIMKKYKDSFVKVQNMLNAMDLVSVQIFGEFAGGGIQKGVDYGDKDFYVFDILSDSGNEKVYWDDYRVESFATTLGLKLAPLLGRGSFAELSQYPNDFKSIVNYYNELVDTTDLEHANKHVFGPQASSETGVAEGYVLKPVYPIFFNNGTRVAIKCKNSKFSEKAKSDKPIKAKVELTENDKRVLEIFSEYVTWNRVSNVLSHIGSVTAKDFGRVMGLTMKDIINEAAREGHDMLFADNPSAVKKELTWLIQNTIRSKWHEVLE

SEQ ID NO: 277 - DNA, 1038 bp, synthetic construct
  misc_feature 1..1038: note = Engineered RNA ligase variants
  source 1..1038: mol_type = other DNA
atgcatcaccatcaccatcacggtggcagcggtatgtttgcgccgtattcaagtctggaaaaccattacaataataagttcattgagaagatccgtggggcaggcttcgatatgcacaccgtggaatgggtagctcgcgagaagattcatggaacgaactttagcgttatcattactccgaccgaaatcgtcccagccaaacgcacagggccgatcttggaaggcgagtcgttctttggtcacgaaattatcatgaaaaaatataaagactccttcgtgaaggtgcagaacatgctgaatgccatggatcttgttagcgtgcaaatctttggcgaatttgcgggtggtggcattcagaaaggcgtcgattacggagacaaagatttctatgtgtttgacatcctgtctgatagcgggaacgagaaagtttactgggatgactatcgcgtcgaatcgttttgcaccacgctcggtctgaaattagcgcctctgctgggacgtggtagtttcgctgaactgtcccagtacccaaacgatttcaaaagcattgtgaaccgttataatgaattggttgatacgacggacctggaacatgccaataaacacgtctttggtccgcaagcgtcttctgaaactggcgtagcagaaggctacgttcttaaacccgtcaacccgaaattctttaataatggtacacgcgtggcgattaaatgcaagaactccaaattttcggagaaagccaagagcgacaaaccaattaaagcgaaagtggaactgacggagaacgataaacgtgtgctcgaaatctttagcgagtatgttacctggaatcgcgtcagtaacgtactgtcacatattggctcagtgaccgcaaaagattttgggcgtgttatgggtctgacgatgaaagacatcattaatgaagcagcacgcgaaggccatgatatggctttcgctgataacccgtcggcggtgaagaaagagctgaccctgctcatccagaacacgattcgttccaaatggcacgaagttctggag

SEQ ID NO: 278 - protein, 346 aa, synthetic construct
  REGION 1..346: note = Engineered RNA ligase variants
MHHHHHHGGSGMFAPYSSLENHYNNKFIEKIRGAGFDMHTVEWVAREKIHGTNFSVIITPTEIVPAKRTGPILEGESFFGHEIIMKKYKDSFVKVQNMLNAMDLVSVQIFGEFAGGGIQKGVDYGDKDFYVFDILSDSGNEKVYWDDYRVESFCTTLGLKLAPLLGRGSFAELSQYPNDFKSIVNRYNELVDTTDLEHANKHVFGPQASSETGVAEGYVLKPVNPKFFNNGTRVAIKCKNSKFSEKAKSDKPIKAKVELTENDKRVLEIFSEYVTWNRVSNVLSHIGSVTAKDFGRVMGLTMKDIINEAAREGHDMAFADNPSAVKKELTLLIQNTIRSKWHEVLE

SEQ ID NO: 279 - DNA, 1038 bp, synthetic construct
  misc_feature 1..1038: note = Engineered RNA ligase variants
  source 1..1038: mol_type = other DNA
atgcatcaccatcaccatcacggtggcagcggtatgtttgcgtattattcaagtctggaaaaccattacaataataagttcattgagaagatccgtggggcaggcttcgatatgcacaccgtggaatgggtagctcgcgagaagattcatggaacgaactttagcgttatcattactccgaccgaaatcgtcccagccaaacgcacagggccgatcttggaaggcgagtcgttctttggtcacgaaattatcatgaagaaatataaagactccttcgtgaaggtgcagaacatgctgaatgccatggatcttgttagcgtgcaaatctttggcgaatttgcgggtggtggcattcagaaaggcgtcgattacggagacaaagatttctatgtgtttgacatcctgtctgatagcgggaacgagaaagtttactgggatgactatgtcgtcgaatcgttttgcaccgggctcggtctgaaattagcgcctctgctgggacgtggtagtttcgctgaactgtcccagtacccaaacgatttcaaaagcattgtgaacgactataatgaattggttgatacgacgggcctggaacatgccaataaacacgtctttggtccgcaagcgtcttctgaaactggcgtagcagaaggctacgttcttaaacccgtcaacccgaaattctttaataatggtacacgcgtggcgattaaatgcaagaactccaaattttcggagaaagccaagagcgacaaaccaattaaagcgaaagtggaactgacggagaacgataaacgtgtgctcgaaatctttagcgagtatgttacctggaatcgcgtcagtaacgtactgtcacatattggctcagtgaccgcaaaagattttgggcgtgttatgggtctgacgatgaaagacatcattaatgaagcagcacgcgaaggccatgatatgttgttcgctgataacccgtcggcggtgaagaaagagctgaccattctcatccagaacacgattcgttccaaatggcacgaagttctggag

SEQ ID NO: 280 - protein, 346 aa, synthetic construct
  REGION 1..346: note = Engineered RNA ligase variants
MHHHHHHGGSGMFAYYSSLENHYNNKFIEKIRGAGFDMHTVEWVAREKIHGTNFSVIITPTEIVPAKRTGPILEGESFFGHEIIMKKYKDSFVKVQNMLNAMDLVSVQIFGEFAGGGIQKGVDYGDKDFYVFDILSDSGNEKVYWDDYVVESFCTGLGLKLAPLLGRGSFAELSQYPNDFKSIVNDYNELVDTTGLEHANKHVFGPQASSETGVAEGYVLKPVNPKFFNNGTRVAIKCKNSKFSEKAKSDKPIKAKVELTENDKRVLEIFSEYVTWNRVSNVLSHIGSVTAKDFGRVMGLTMKDIINEAAREGHDMLFADNPSAVKKELTILIQNTIRSKWHEVLE

SEQ ID NO: 281 - DNA, 1038 bp, synthetic construct
  misc_feature 1..1038: note = Engineered RNA ligase variants
  source 1..1038: mol_type = other DNA
atgcatcaccatcaccatcacggtggcagcggtatgtttgcggaatattcaagtctggaaaaccattacaataataagttcattgagaagatccgtggggcaggcttcgatatgcacaccgtggaatgggtagctcgcgagaagattcatggaacgaactttagcgttatcattactccgaccgaaatcgtcccagccaaacgcacagggccgatcttggaaggcgagtcgttctttggtcacgaaattatcatgggcaaatataaagactccttcgtgaaggtgcagaacatgctgaatgccatggatcttgttagcgtgcaaatctttggcgaatttgcgggtggtggcattcagaaaggcgtcgattacggagacaaagatttctatgtgtttgacatcctgtctgatagcgggaacgagaaagtttactgggatgactatgtcgtcgaatcgtttgcgaccgggctcggtctgaaattagcgcctctgctgggacgtggtagtttcgctgaactgtcccagtacccaaacgatttcaaaagcattgtgaactattataatgaattggttgatacgacgggcctggaacatgccaataaacacgtctttggtccgcaagcgtcttctgaaactggcgtagcagaaggctacgttcttaaacccgtctatccgatcttctttaataatggtacacgcgtggcgattaaatgcaagaactccaaattttcggagaaagccaagagcgacaaaccaattaaagcgaaagtggaactgacggagaacgataaacgtgtgctcgaaatctttagcgagtatgttacctggaatcgcgtcagtaacgtactgtcacatattggctcagtgaccgcaaaagattttgggcgtgttatgggtctgacgatgaaagacatcattaatgaagcagcacgcgaaggccatgatatgctgttcgctgataacccgtcggcggtgaagaaagagctgaccattctcatccagaacacgattcgttccaaatggcacgaagttctggag

SEQ ID NO: 282 - protein, 346 aa, synthetic construct
  REGION 1..346: note = Engineered RNA ligase variants
MHHHHHHGGSGMFAEYSSLENHYNNKFIEKIRGAGFDMHTVEWVAREKIHGTNFSVIITPTEIVPAKRTGPILEGESFFGHEIIMGKYKDSFVKVQNMLNAMDLVSVQIFGEFAGGGIQKGVDYGDKDFYVFDILSDSGNEKVYWDDYVVESFATGLGLKLAPLLGRGSFAELSQYPNDFKSIVNYYNELVDTTGLEHANKHVFGPQASSETGVAEGYVLKPVYPIFFNNGTRVAIKCKNSKFSEKAKSDKPIKAKVELTENDKRVLEIFSEYVTWNRVSNVLSHIGSVTAKDFGRVMGLTMKDIINEAAREGHDMLFADNPSAVKKELTILIQNTIRSKWHEVLE

SEQ ID NO: 283 - DNA, 1038 bp, synthetic construct
  misc_feature 1..1038: note = Engineered RNA ligase variants
  source 1..1038: mol_type = other DNA
atgcatcaccatcaccatcacggtggcagcggtatgtttgcgaaatattcaagtctggaaaaccattacaataataagttcattgagaagatccgtggtgcaggcttcgatatgcacaccgtggaatgggtagctcgcgagaagattcatggaacgaactttagcgttatcattactccgaccgaaatcgtcccagccaaacgcacagggccgatcttggaaggcgagtcgttctttggtcacgaaattatcatgaagaaatataaagactccttcgtgaaggtgcagaacatgctgaatgccatggatcttgttagcgtgcaaatctttggcgaatttgcgggtggtggcattcagaaaggcgtcgattacggagacaaagatttctatgtgtttgacatcctgtctgatagcgggaacgagaaagtttactgggatgactatgtagtcgaatcgtttgcaaccggcctcggtctgaaattagcgcctctgctgggacgtggtagtttcgctgaactgtcccagtacccaaacgatttcaaaagcattgtgaactattataatgaattggttgatacgacggacctggaacatgccaataaacacgtctttggtccgcaagcgtcttctgaaactggcgtagcagaaggctacgttcttaaacccgtcaacccgaaattctttaatgatggtacacgcgtggcgattaaatgcaagaactccaaattttcggagaaagccaagagcgacaaaccaattaaagcgaaagtggaactgacggagaacgataaacgtgtgctcgaaatctttagcgagtatgttacctggaatcgcgtcagtaacgtactgtcacatattggctcagtgaccgcaaaagattttgggcgtgttatgggtctgacgatgaaagacatcattaatgaagcagcacgcgaaggccatgatatgttgttcgctgataacccgtcggcggtgaagaaagagctgaccattctcatccagaacacgattcgttccaaatggcacgaagttctggag

SEQ ID NO: 284 - protein, 346 aa, synthetic construct
  REGION 1..346: note = Engineered RNA ligase variants
MHHHHHHGGSGMFAKYSSLENHYNNKFIEKIRGAGFDMHTVEWVAREKIHGTNFSVIITPTEIVPAKRTGPILEGESFFGHEIIMKKYKDSFVKVQNMLNAMDLVSVQIFGEFAGGGIQKGVDYGDKDFYVFDILSDSGNEKVYWDDYVVESFATGLGLKLAPLLGRGSFAELSQYPNDFKSIVNYYNELVDTTDLEHANKHVFGPQASSETGVAEGYVLKPVNPKFFNDGTRVAIKCKNSKFSEKAKSDKPIKAKVELTENDKRVLEIFSEYVTWNRVSNVLSHIGSVTAKDFGRVMGLTMKDIINEAAREGHDMLFADNPSAVKKELTILIQNTIRSKWHEVLE

SEQ ID NO: 285 - DNA, 1038 bp, synthetic construct
  misc_feature 1..1038: note = Engineered RNA ligase variants
  source 1..1038: mol_type = other DNA
atgcatcaccatcaccatcacggtggcagcggtatgtttgcgccgtattcaagtctggaaaaccattacaataataagttcattgagaagatccgtctggcaggcttcgatatgcacaccgtggaatgggtagctcgcgagaagattcatggaacgaactttagcgttatcattactccgaccgaaatcgtcccagccaaacgcacagggccgatcttggaaggcgagtcgttctttggtcacgaaattatcatgaagaaatataaagactccttcgtgaaggtgcagaacatgctgaatgccatggatcttgttagcgtgcaaatctttggcgaatttgcgggtggtggcattcagaaaggcgtcgattacggagacaaagatttctatgtgtttgacatcctgtctgatagcgggaacgagaaagtttactgggatgactatgtcgtcgaatcgtttgcgaccacgctcggtctgaaattagcgcctctgctgggacgtggtagtttcgctgaactgtcccagtacccaaacgatttcaaaagcattgtgaactactataatgaattggttgatacgacggacctggaacatgccaataaacacgtctttggtccgcaagcgtcttctgaaactggcgtagcagaaggctacgttcttaaacccgtcaatccgaagttctttaataatggtacacgcgtggcgattaaatgcaagaactccaaattttcggagaaagccaagagcgacaaaccaattaaagcgaaagtggaactgacggagaacgataaacgtgtgctcgaaatctttagcgagtatgttacctggaatcgcgtcagtaacgtactgtcacatattggctcagtgaccgcaaaagattttgggcgtgttatgggtctgacgatgaaagacatcattaatgaagcagcacgcgaaggccatgatatgctgttcgctgataacccgtcggcggtgaagaaagagctgacccgcctcatccagaacacgattcgttccaaatggcacgaagttctggag

SEQ ID NO: 286 - protein, 346 aa, synthetic construct
  REGION 1..346: note = Engineered RNA ligase variants
MHHHHHHGGSGMFAPYSSLENHYNNKFIEKIRLAGFDMHTVEWVAREKIHGTNFSVIITPTEIVPAKRTGPILEGESFFGHEIIMKKYKDSFVKVQNMLNAMDLVSVQIFGEFAGGGIQKGVDYGDKDFYVFDILSDSGNEKVYWDDYVVESFATTLGLKLAPLLGRGSFAELSQYPNDFKSIVNYYNELVDTTDLEHANKHVFGPQASSETGVAEGYVLKPVNPKFFNNGTRVAIKCKNSKFSEKAKSDKPIKAKVELTENDKRVLEIFSEYVTWNRVSNVLSHIGSVTAKDFGRVMGLTMKDIINEAAREGHDMLFADNPSAVKKELTRLIQNTIRSKWHEVLE

SEQ ID NO: 287 - DNA, 1038 bp, synthetic construct
  misc_feature 1..1038: note = Engineered RNA ligase variants
  source 1..1038: mol_type = other DNA
atgcatcaccatcaccatcacggtggcagcggtatgtttgcgttgtattcaagtctggaaaaccattacaataataagttcattgagaagatccgtctggcaggcttcgatatgcacaccgtggaatgggtagctcgcgagaagattcatggaacgaactttagcgttatcattactccgaccgaaatcgtcccagccaaacgcacagggccgatcttggaaggcgagtcgttctttggtcacgaaattatcatgaagaaatataaagactccttcgtgaaggtgcagaacatgctgaatgccatggatcttgttagcgtgcaaatctttggcgaatttgcgggtggtggcattcagaaaggcgtcgattacggagacaaagatttctatgtgtttgacatcctgtctgatagcgggaacgagaaagtttactgggatgactatgtcgtcgaatcgtttgcgaccacgctcggtctgaaattagcgcctctgctgggacgtggtagtttcgctgaactgtcccagtacccaaacgatttcaaaagcattgtgaactattataatgaattggttgatacgacgggcctggaacatgccaataaacacgtctttggtccgcaagcgtcttctgaaactggcgtagcagaaggctacgttcttaaacccgtctatccgatcttctttaataatggtacacgcgtggcgattaaatgcaagaactccaaattttcggagaaagccaagagcgacaaaccaattaaagcgaaagtggaactgacggagaacgataaacgtgtgctcgaaatctttagcgagtatgttacctggaatcgcgtcagtaacgtactgtcacatattggctcagtgaccgcaaaagattttgggcgtgttatgggtctgacgatgaaagacatcattaatgaagcagcacgcgaaggccatgatatgctgttcgctgataacccgtcggcggtgaagaaagagctgaccattctcatccagaacacgattcgttccaaatggcacgaagttctggag

SEQ ID NO: 288 - protein, 346 aa, synthetic construct
  REGION 1..346: note = Engineered RNA ligase variants
MHHHHHHGGSGMFALYSSLENHYNNKFIEKIRLAGFDMHTVEWVAREKIHGTNFSVIITPTEIVPAKRTGPILEGESFFGHEIIMKKYKDSFVKVQNMLNAMDLVSVQIFGEFAGGGIQKGVDYGDKDFYVFDILSDSGNEKVYWDDYVVESFATTLGLKLAPLLGRGSFAELSQYPNDFKSIVNYYNELVDTTGLEHANKHVFGPQASSETGVAEGYVLKPVYPIFFNNGTRVAIKCKNSKFSEKAKSDKPIKAKVELTENDKRVLEIFSEYVTWNRVSNVLSHIGSVTAKDFGRVMGLTMKDIINEAAREGHDMLFADNPSAVKKELTILIQNTIRSKWHEVLE

SEQ ID NO: 289 - DNA, 1038 bp, synthetic construct
  misc_feature 1..1038: note = Engineered RNA ligase variants
  source 1..1038: mol_type = other DNA
atgcatcaccatcaccatcacggtggcagcggtatgtttgcgaaatattcaagtctggaaaaccattacaataataagttcattgagaagatccgtctggcaggcttcgatatgcacaccgtggaatgggtagctcgcgagaagattcatggaacgaactttagcgttatcattactccgaccgaaatcgtcccagccaaacgcacagggccgatcttggaaggcgagtcgttctttggtcacgaaattatcatgaagaaatataaagactccttcgtgaaggtgcagaacatgctgaatgccatggatcttgttagcgtgcaaatctttggcgaatttgcgggtggtggcattcagaaaggcgtcgattacggagacaaagatttctatgtgtttgacatcctgtctgatagcgggaacgagaaagtttactgggatgactatcgcgtcgaatcgtttgcgaccacgctcggtctgaaattagcgcctctgctgggacgtggtagtttcgctgaactgtcccagtacccaaacgatttcaaaagcattgtgaactattataatgaattggttgatacgacggacctggaacatgccaataaacacgtctttggtccgcaagcgtcttctgaaactggcgtagcagaaggctacgttcttaaacccgtcaacccgaaattctttaataatggtacacgcgtggcgattaaatgcaagaactccaaattttcggagaaagccaagagcgacaaaccaattaaagcgaaagtggaactgacggagaacgataaacgtgtgctcgaaatctttagcgagtatgttacctggaatcgcgtcagtaacgtactgtcacatattggctcagtgaccgcaaaagattttgggcgtgttatgggtctgacgatgaaagacatcattaatgaagcagcacgcgaaggccatgatatggctttcgctgataacccgtcggcggtgaagaaagagctgaccattctcatccagaacacgattcgttccaaatggcacgaagttctggag

SEQ ID NO: 290 - protein, 346 aa, synthetic construct
  REGION 1..346: note = Engineered RNA ligase variants
MHHHHHHGGSGMFAKYSSLENHYNNKFIEKIRLAGFDMHTVEWVAREKIHGTNFSVIITPTEIVPAKRTGPILEGESFFGHEIIMKKYKDSFVKVQNMLNAMDLVSVQIFGEFAGGGIQKGVDYGDKDFYVFDILSDSGNEKVYWDDYRVESFATTLGLKLAPLLGRGSFAELSQYPNDFKSIVNYYNELVDTTDLEHANKHVFGPQASSETGVAEGYVLKPVNPKFFNNGTRVAIKCKNSKFSEKAKSDKPIKAKVELTENDKRVLEIFSEYVTWNRVSNVLSHIGSVTAKDFGRVMGLTMKDIINEAAREGHDMAFADNPSAVKKELTILIQNTIRSKWHEVLE

SEQ ID NO: 291 - DNA, 1038 bp, synthetic construct
  misc_feature 1..1038: note = Engineered RNA ligase variants
  source 1..1038: mol_type = other DNA
atgcatcaccatcaccatcacggtggcagcggtatgtttgcggaatattcaagtctggaaaaccattacaataataagttcattgagaagatccgtctggcaggcttcgatatgcacaccgtggaatgggtagctcgcgagaagattcatggaacgaactttagcgttatcattactccgaccgaaatcgtcccagccaaacgcacagggccgatcttggaaggcgagtcgttctttggtcacgaaattatcatgaagaaatataaagactccttcgtgaaggtgcagaacatgctgaatgccatggatcttgttagcgtgcaaatctttggcgaatttgcgggtggtggcattcagaaaggcgtcgattacggagacaaagatttctatgtgtttgacatcctgtctgatagcgggaacgagaaagtttactgggatgactatgtagtcgaatcgtttgcgaccgggctcggtctgaaattagcgcctctgctgggacgtggtagtttcgctgaactgtcccagtacccaaacgatttcaaaagcattgtgaaccgttataatgaattggttgatacgacgggcctggaacatgccaataaacacgtctttggtccgcaagcgtcttctgaaactggcgtagcagaaggctacgttcttaaacccgtcaacccgaaattctttaataatggtacacgcgtggcgattaaatgcaagaactccaaattttcggagaaagccaagagcgacaaaccaattaaagcgaaagtggaactgacggagaacgataaacgtgtgctcgaaatctttagcgagtatgttacctggaatcgcgtcagtaacgtactgtcacatattggctcagtgaccgcaaaagattttgggcgtgttatgggtctgacgatgaaagacatcattaatgaagcagcacgcgaaggccatgatatgttgttcgctgataacccgtcggcggtgaagaaagagctgaccattctcatccagaacacgattcgttccaaatggcacgaagttctggag

SEQ ID NO: 292 - protein, 346 aa, synthetic construct
  REGION 1..346: note = Engineered RNA ligase variants
MHHHHHHGGSGMFAEYSSLENHYNNKFIEKIRLAGFDMHTVEWVAREKIHGTNFSVIITPTEIVPAKRTGPILEGESFFGHEIIMKKYKDSFVKVQNMLNAMDLVSVQIFGEFAGGGIQKGVDYGDKDFYVFDILSDSGNEKVYWDDYVVESFATGLGLKLAPLLGRGSFAELSQYPNDFKSIVNRYNELVDTTGLEHANKHVFGPQASSETGVAEGYVLKPVNPKFFNNGTRVAIKCKNSKFSEKAKSDKPIKAKVELTENDKRVLEIFSEYVTWNRVSNVLSHIGSVTAKDFGRVMGLTMKDIINEAAREGHDMLFADNPSAVKKELTILIQNTIRSKWHEVLE

SEQ ID NO: 293 - DNA, 1038 bp, synthetic construct
  misc_feature 1..1038: note = Engineered RNA ligase variants
  source 1..1038: mol_type = other DNA
atgcatcaccatcaccatcacggtggcagcggtatgtttgcgaaatattcaagtctggaaaaccattacaataataagttcattgagaagatccgtggtgcaggcttcgatatgcacaccgtggaatgggtagctcgcgagaagattcatggaacgaactttagcgttatcattactccgaccgaaatcgtcccagccaaacgcacagggccgatcttggaaggcgagtcgttctttggtcacgaaattatcatgaagaaatataaagactccttcgtgaaggtgcagaacatgctgaatgccatggatcttgttagcgtgcaaatctttggcgaatttgcgggtggtggcattcagaaaggcgtcgattacggagacaaagatttctatgtgtttgacatcctgtctgatagcgggaacgagaaagtttactgggatgactatgtagtcgaatcgtttgcaaccggcctcggtctgaaattagcgcctctgctgggacgtggtagtttcgctgaactgtcccagtacccaaacgatttcaaaagcattgtgaactattataatgaattggttgatacgacggacctggaacatgccaataaacacgtctttggtccgcaagcgtcttctgaaactggcgtagcagaaggctacgttcttaaacccgtcaacccgaaattctttaataatggtacacgcgtggcgattaaatgcaagaactccaaattttcggagaaagccaagagcgacaaaccaattaaagcgaaagtggaactgacggagaacgataaacgtgtgctcgaaatctttagcgagtatgttacctggaatcgcgtcagtaacgtactgtcacatattggctcagtgaccgcaaaagattttgggcgtgttatgggtctgacgatgaaagacatcattaatgaagcagcacgcgaaggccatgatatgttgttcgctgataacccgtcggcggtgaagaaagagctgaccattctcatccggaacacgattcgttccaaatggcacgaagttctggag

SEQ ID NO: 294 - protein, 346 aa, synthetic construct
  REGION 1..346: note = Engineered RNA ligase variants
MHHHHHHGGSGMFAKYSSLENHYNNKFIEKIRGAGFDMHTVEWVAREKIHGTNFSVIITPTEIVPAKRTGPILEGESFFGHEIIMKKYKDSFVKVQNMLNAMDLVSVQIFGEFAGGGIQKGVDYGDKDFYVFDILSDSGNEKVYWDDYVVESFATGLGLKLAPLLGRGSFAELSQYPNDFKSIVNYYNELVDTTDLEHANKHVFGPQASSETGVAEGYVLKPVNPKFFNNGTRVAIKCKNSKFSEKAKSDKPIKAKVELTENDKRVLEIFSEYVTWNRVSNVLSHIGSVTAKDFGRVMGLTMKDIINEAAREGHDMLFADNPSAVKKELTILIRNTIRSKWHEVLE

SEQ ID NO: 295 - DNA, 1038 bp, synthetic construct
  misc_feature 1..1038: note = Engineered RNA ligase variants
  source 1..1038: mol_type = other DNA
atgcatcaccatcaccatcacggtggcagcggtatgtttgcggaatattcaagtctggaaaaccattacaataataagttcattgagaagatccgtggtgcaggcttcgatatgcacaccgtggaatgggtagctcgcgagaagattcatggaacgaactttagcgttatcattactccgaccgaaatcgtcccagccaaacgcacagggccgatcttggaaggcgagtcgttctttggtcacgaaattatcatgaagaaatataaagactccttcgtgaaggtgcagaacatgctgaatgccatggatcttgttagcgtgcaaatctttggcgaatttgcgggtggtggcattcagaaaggcgtcgattacggagacaaagatttctatgtgtttgacatcctgtctgatagcgggaacgagaaagtttactgggatgactatgtcgtcgaatcgttttgcaccacgctcggtctgaaattagcgcctctgctgggacgtggtagtttcgctgaactgtcccagtacccaaacgatttcaaaagcattgtgaactattataatgaattggttgatacgacggacctggaacatgccaataaacacgtctttggtccgcaagcgtcttctgaaactggcgtagcagaaggctacgttcttaaacccgtctatccgaagttctttaataatggtacacgcgtggcgattaaatgcaagaactccaaattttcggagaaagccaagagcgacaaaccaattaaagcgaaagtggaactgacggagaacgataaacgtgtgctcgaaatctttagcgagtatgttacctggaatcgcgtcagtaacgtactgtcacatattggctcagtgaccgcaaaagattttgggcgtgttatgggtctgacgatgaaagacatcattaatgaagcagcacgcgaaggccatgatatggctttcgctgataacccgtcggcggtgaagaaagagctgaccattctcatccagaacacgattcgttccaaatggcacgaagttctggag

SEQ ID NO: 296 - protein, 346 aa, synthetic construct
  REGION 1..346: note = Engineered RNA ligase variants
MHHHHHHGGSGMFAEYSSLENHYNNKFIEKIRGAGFDMHTVEWVAREKIHGTNFSVIITPTEIVPAKRTGPILEGESFFGHEIIMKKYKDSFVKVQNMLNAMDLVSVQIFGEFAGGGIQKGVDYGDKDFYVFDILSDSGNEKVYWDDYVVESFCTTLGLKLAPLLGRGSFAELSQYPNDFKSIVNYYNELVDTTDLEHANKHVFGPQASSETGVAEGYVLKPVYPKFFNNGTRVAIKCKNSKFSEKAKSDKPIKAKVELTENDKRVLEIFSEYVTWNRVSNVLSHIGSVTAKDFGRVMGLTMKDIINEAAREGHDMAFADNPSAVKKELTILIQNTIRSKWHEVLE

SEQ ID NO: 297 - DNA, 1038 bp, synthetic construct
  misc_feature 1..1038: note = Engineered RNA ligase variants
  source 1..1038: mol_type = other DNA
atgcatcaccatcaccatcacggtggcagcggtatgtttgcgtattattcaagtctggaaaaccattacaataataagttcattgagaagatccgtggggcaggcttcgatatgcacaccgtggaatgggtagctcgcgagaagattcatggaacgaactttagcgttatcattactccgaccgaaatcgtcccagccaaacgcacagggccgatcttggaaggcgagtcgttctttggtcacgaaattatcatgaagaaatataaagactccttcgtgaaggtgcagaacatgctgaatgccatggatcttgttagcgtgcaaatctttggcgaatttgcgggtggtggcattcagaaaggcgtcgattacggagacaaagatttctatgtgtttgacatcctgtctgatagcgggaacgagaaagtttactgggatgactatcgcgtcgaatcgtttgcgaccgggctcggtctgaaattagcgcctctgctgggacgtggtagtttcgctgaactgtcccagtacccaaacgatttcaaaagcattgtgaaccgttataatgaattggttgatacgacggacctggaacatgccaataaacacgtctttggtccgcaagcgtcttctgaaactggcgtagcagaaggctacgttcttaaacccgtcaacccgaaattctttaataatggtacacgcgtggcgattaaatgcaagaactccaaattttcggagaaagccaagagcgacaaaccaattaaagcgaaagtggaactgacggagaacgataaacgtgtgctcgaaatctttagcgagtatgttacctggaatcgcgtcagtaacgtactgtcacatattggctcagtgaccgcaaaagattttgggcgtgttatgggtctgacgatgaaagacatcattaatgaagcagcacgcgaaggccatgatatgctgttcgctgataacccgtcggcggtgaagaaagagctgacctggctcatccagaacacgattcgttccaaatggcacgaagttctggag

SEQ ID NO: 298 - protein, 346 aa, synthetic construct
  REGION 1..346: note = Engineered RNA ligase variants
MHHHHHHGGSGMFAYYSSLENHYNNKFIEKIRGAGFDMHTVEWVAREKIHGTNFSVIITPTEIVPAKRTGPILEGESFFGHEIIMKKYKDSFVKVQNMLNAMDLVSVQIFGEFAGGGIQKGVDYGDKDFYVFDILSDSGNEKVYWDDYRVESFATGLGLKLAPLLGRGSFAELSQYPNDFKSIVNRYNELVDTTDLEHANKHVFGPQASSETGVAEGYVLKPVNPKFFNNGTRVAIKCKNSKFSEKAKSDKPIKAKVELTENDKRVLEIFSEYVTWNRVSNVLSHIGSVTAKDFGRVMGLTMKDIINEAAREGHDMLFADNPSAVKKELTWLIQNTIRSKWHEVLE

SEQ ID NO: 299 - DNA, 1038 bp, synthetic construct
  misc_feature 1..1038: note = Engineered RNA ligase variants
  source 1..1038: mol_type = other DNA
atgcatcaccatcaccatcacggtggcagcggtatgtttgcgtattattcaagtctggaaaaccattacaataataagttcattgagaagatccgtggggcaggcttcgatatgcacaccgtggaatgggtagctcgcgagaagattcatggaacgaactttagcgttatcattactccgaccgaaatcgtcccagccaaacgcacagggccgatcttggaaggcgagtcgttctttggtcacgaaattatcatgggcaaatataaagactccttcgtgaaggtgcagaacatgctgaatgccatggatcttgttagcgtgcaaatctttggcgaatttgcgggtggtggcattcagaaaggcgtcgattacggagacaaagatttctatgtgtttgacatcctgtctgatagcgggaacgagaaagtttactgggatgactatactgtcgaatcgtttgcgaccgggctcggtctgaaattagcgcctctgctgggacgtggtagtttcgctgaactgtcccagtacccaaacgatttcaaaagcattgtgaaccgttataatgaattggttgatacgacgggcctggaacatgccaataaacacgtctttggtccgcaagcgtcttctgaaactggcgtagcagaaggctacgttcttaaacccgtcaacccgaaattctttaataatggtacacgcgtggcgattaaatgcaagaactccaaattttcggagaaagccaagagcgacaaaccaattaaagcgaaagtggaactgacggagaacgataaacgtgtgctcgaaatctttagcgagtatgttacctggaatcgcgtcagtaacgtactgtcacatattggctcagtgaccgcaaaagattttgggcgtgttatgggtctgacgatgaaagacatcattaatgaagcagcacgcgaaggccatgatatggctttcgctgataacccgtcggcggtgaagaaagagctgaccattctcatccagaacacgattcgttccaaatggcacgaagttctggag

SEQ ID NO: 300 - protein, 346 aa, synthetic construct
  REGION 1..346: note = Engineered RNA ligase variants
MHHHHHHGGSGMFAYYSSLENHYNNKFIEKIRGAGFDMHTVEWVAREKIHGTNFSVIITPTEIVPAKRTGPILEGESFFGHEIIMGKYKDSFVKVQNMLNAMDLVSVQIFGEFAGGGIQKGVDYGDKDFYVFDILSDSGNEKVYWDDYTVESFATGLGLKLAPLLGRGSFAELSQYPNDFKSIVNRYNELVDTTGLEHANKHVFGPQASSETGVAEGYVLKPVNPKFFNNGTRVAIKCKNSKFSEKAKSDKPIKAKVELTENDKRVLEIFSEYVTWNRVSNVLSHIGSVTAKDFGRVMGLTMKDIINEAAREGHDMAFADNPSAVKKELTILIQNTIRSKWHEVLE

SEQ ID NO: 301 - DNA, 1038 bp, synthetic construct
  misc_feature 1..1038: note = Engineered RNA ligase variants
  source 1..1038: mol_type = other DNA
atgcatcaccatcaccatcacggtggcagcggtatgtttgcgccgtattcaagtctggaaaaccattacaataataagttcattgagaagatccgtctggcaggcttcgatatgcacaccgtggaatgggtagctcgcgagaagattcatggaacgaactttagcgttatcattactccgaccgaaatcgtcccagccaaacgcacagggccgatcttggaaggcgagtcgttctttggtcacgaaattatcatgaagaaatataaagactccttcgtgaaggtgcagaacatgctgaatgccatggatcttgttagcgtgcaaatctttggcgaatttgcgggtggtggcattcagaaaggcgtcgattacggagacaaagatttctatgtgtttgacatcctgtctgatagcgggaacgagaaagtttactgggatgactatgtcgtcgaatcgttttgcaccgggctcggtctgaaattagcgcctctgctgggacgtggtagtttcgctgaactgtcccagtacccaaacgatttcaaaagcattgtgaactactataatgaattggttgatacgacgggcctggaacatgccaataaacacgtctttggtccgcaagcgtcttctgaaactggcgtagcagaaggctacgttcttaaacccgtcaatccgaagttctttaataatggtacacgcgtggcgattaaatgcaagaactccaaattttcggagaaagccaagagcgacaaaccaattaaagcgaaagtggaactgacggagaacgataaacgtgtgctcgaaatctttagcgagtatgttacctggaatcgcgtcagtaacgtactgtcacatattggctcagtgaccgcaaaagattttgggcgtgttatgggtctgacgatgaaagacatcattaatgaagcagcacgcgaaggccatgatatgctgttcgctgataacccgtcggcggtgaagaaagagctgaccattctcatccagaacacgattcgttccaaatggcacgaagttctggag

SEQ ID NO: 302 - protein, 346 aa, synthetic construct
  REGION 1..346: note = Engineered RNA ligase variants
MHHHHHHGGSGMFAPYSSLENHYNNKFIEKIRLAGFDMHTVEWVAREKIHGTNFSVIITPTEIVPAKRTGPILEGESFFGHEIIMKKYKDSFVKVQNMLNAMDLVSVQIFGEFAGGGIQKGVDYGDKDFYVFDILSDSGNEKVYWDDYVVESFCTGLGLKLAPLLGRGSFAELSQYPNDFKSIVNYYNELVDTTGLEHANKHVFGPQASSETGVAEGYVLKPVNPKFFNNGTRVAIKCKNSKFSEKAKSDKPIKAKVELTENDKRVLEIFSEYVTWNRVSNVLSHIGSVTAKDFGRVMGLTMKDIINEAAREGHDMLFADNPSAVKKELTILIQNTIRSKWHEVLE

SEQ ID NO: 303 - DNA, 1038 bp, synthetic construct
  misc_feature 1..1038: note = Engineered RNA ligase variants
  source 1..1038: mol_type = other DNA
atgcatcaccatcaccatcacggtggcagcggtatgtttgcgccgtattcaagtctggaaaaccattacaataataagttcattgagaagatccgtggggcaggcttcgatatgcacaccgtggaatgggtagctcgcgagaagattcatggaacgaactttagcgttatcattactccgaccgaaatcgtcccagccaaacgcacagggccgatcttggaaggcgagtcgttctttggtcacgaaattatcatgaaaaaatataaagactccttcgtgaaggtgcagaacatgctgaatgccatggatcttgttagcgtgcaaatctttggcgaatttgcgggtggtggcattcagaaaggcgtcgattacggagacaaagatttctatgtgtttgacatcctgtctgatagcgggaacgagaaagtttactgggatgactatgtcgtcgaatcgttttgcaccacgctcggtctgaaattagcgcctctgctgggacgtggtagtttcgctgaactgtcccagtacccaaacgatttcaaaagcattgtgaaccgttataatgaattggttgatacgacggacctggaacatgccaataaacacgtctttggtccgcaagcgtcttctgaaactggcgtagcagaaggctacgttcttaaacccgtcaacccgaaattctttaataatggtacacgcgtggcgattaaatgcaagaactccaaattttcggagaaagccaagagcgacaaaccaattaaagcgaaagtggaactgacggagaacgataaacgtgtgctcgaaatctttagcgagtatgttacctggaatcgcgtcagtaacgtactgtcacatattggctcagtgaccgcaaaagattttgggcgtgttatgggtctgacgatgaaagacatcattaatgaagcagcacgcgaaggccatgatatggctttcgctgataacccgtcggcggtgaagaaagagctgacccgcctcatccagaacacgattcgttccaaatggcacgaagttctggag

SEQ ID NO: 304 - protein, 346 aa, synthetic construct
  REGION 1..346: note = Engineered RNA ligase variants
MHHHHHHGGSGMFAPYSSLENHYNNKFIEKIRGAGFDMHTVEWVAREKIHGTNFSVIITPTEIVPAKRTGPILEGESFFGHEIIMKKYKDSFVKVQNMLNAMDLVSVQIFGEFAGGGIQKGVDYGDKDFYVFDILSDSGNEKVYWDDYVVESFCTTLGLKLAPLLGRGSFAELSQYPNDFKSIVNRYNELVDTTDLEHANKHVFGPQASSETGVAEGYVLKPVNPKFFNNGTRVAIKCKNSKFSEKAKSDKPIKAKVELTENDKRVLEIFSEYVTWNRVSNVLSHIGSVTAKDFGRVMGLTMKDIINEAAREGHDMAFADNPSAVKKELTRLIQNTIRSKWHEVLE

SEQ ID NO: 305 - DNA, 1038 bp, synthetic construct
  misc_feature 1..1038: note = Engineered RNA ligase variants
  source 1..1038: mol_type = other DNA
atgcatcaccatcaccatcacggtggcagcggtatgtttgcgatgtattcaagtctggaaaaccattacaataataagttcattgagaagatccgtggtgcaggcttcgatatgcacaccgtggaatgggtagctcgcgagaagattcatggaacgaactttagcgttatcattactccgaccgaaatcgtcccagccaaacgcacagggccgatcttggaaggcgagtcgttctttggtcacgaaattatcatgaagaaatataaagactccttcgtgaaggtgcagaacatgctgaatgccatggatcttgttagcgtgcaaatctttggcgaatttgcgggtggtggcattcagaaaggcgtcgattacggagacaaagatttctatgtgtttgacatcctgtctgatagcgggaacgagaaagtttactgggatgactatgtcgtcgaatcgtttgcgaccacgctcggtctgaaattagcgcctctgctgggacgtggtagtttcgctgaactgtcccagtacccaaacgatttcaaaagcattgtgaaccgttataatgaattggttgatacgacggacctggaacatgccaataaacacgtctttggtccgcaagcgtcttctgaaactggcgtagcagaaggctacgttcttaaacccgtcaacccgaagttctttaataatggtacacgcgtggcgattaaatgcaagaactccaaattttcggagaaagccaagagcgacaaaccaattaaagcgaaagtggaactgacggagaacgataaacgtgtgctcgaaatctttagcgagtatgttacctggaatcgcgtcagtaacgtactgtcacatattggctcagtgaccgcaaaagattttgggcgtgttatgggtctgacgatgaaagacatcattaatgaagcagcacgcgaaggccatgatatgttgttcgctgataacccgtcggcggtgaagaaagagctgacccgcctcatccagaacacgattcgttccaaatggcacgaagttctggag

SEQ ID NO: 306 - protein, 346 aa, synthetic construct
  REGION 1..346: note = Engineered RNA ligase variants
MHHHHHHGGSGMFAMYSSLENHYNNKFIEKIRGAGFDMHTVEWVAREKIHGTNFSVIITPTEIVPAKRTGPILEGESFFGHEIIMKKYKDSFVKVQNMLNAMDLVSVQIFGEFAGGGIQKGVDYGDKDFYVFDILSDSGNEKVYWDDYVVESFATTLGLKLAPLLGRGSFAELSQYPNDFKSIVNRYNELVDTTDLEHANKHVFGPQASSETGVAEGYVLKPVNPKFFNNGTRVAIKCKNSKFSEKAKSDKPIKAKVELTENDKRVLEIFSEYVTWNRVSNVLSHIGSVTAKDFGRVMGLTMKDIINEAAREGHDMLFADNPSAVKKELTRLIQNTIRSKWHEVLE

SEQ ID NO: 307 - DNA, 1038 bp, synthetic construct
  misc_feature 1..1038: note = Engineered RNA ligase variants
  source 1..1038: mol_type = other DNA
atgcatcaccatcaccatcacggtggcagcggtatgtttgcgtattattcaagtctggaaaaccattacaataataagttcattgagaagatccgtggtgcaggcttcgatatgcacaccgtggaatgggtagctcgcgagaagattcatggaacgaactttagcgttatcattactccgaccgaaatcgtcccagccaaacgcacagggccgatcttggaaggcgagtcgttctttggtcacgaaattatcatgaagaaatataaagactccttcgtgaaggtgcagaacatgctgaatgccatggatcttgttagcgtgcaaatctttggcgaatttgcgggtggtggcattcagaaaggcgtcgattacggagacaaagatttctatgtgtttgacatcctgtctgatagcgggaacgagaaagtttactgggatgactatactgtcgaatcgtttgcgaccgggctcggtctgaaattagcgcctctgctgggacgtggtagtttcgctgaactgtcccagtacccaaacgatttcaaaagcattgtgaacgactataatgaattggttgatacgacggacctggaacatgccaataaacacgtctttggtccgcaagcgtcttctgaaactggcgtagcagaaggctacgttcttaaacccgtcaatccgaagttctttaataatggtacacgcgtggcgattaaatgcaagaactccaaattttcggagaaagccaagagcgacaaaccaattaaagcgaaagtggaactgacggagaacgataaacgtgtgctcgaaatctttagcgagtatgttacctggaatcgcgtcagtaacgtactgtcacatattggctcagtgaccgcaaaagattttgggcgtgttatgggtctgacgatgaaagacatcattaatgaagcagcacgcgaaggccatgatatggctttcgctgataacccgtcggcggtgaagaaagagctgaccattctcatccagaacacgattcgttccaaatggcacgaagttctggag

SEQ ID NO: 308 - protein, 346 aa, synthetic construct
  REGION 1..346: note = Engineered RNA ligase variants
MHHHHHHGGSGMFAYYSSLENHYNNKFIEKIRGAGFDMHTVEWVAREKIHGTNFSVIITPTEIVPAKRTGPILEGESFFGHEIIMKKYKDSFVKVQNMLNAMDLVSVQIFGEFAGGGIQKGVDYGDKDFYVFDILSDSGNEKVYWDDYTVESFATGLGLKLAPLLGRGSFAELSQYPNDFKSIVNDYNELVDTTDLEHANKHVFGPQASSETGVAEGYVLKPVNPKFFNNGTRVAIKCKNSKFSEKAKSDKPIKAKVELTENDKRVLEIFSEYVTWNRVSNVLSHIGSVTAKDFGRVMGLTMKDIINEAAREGHDMAFADNPSAVKKELTILIQNTIRSKWHEVLE

SEQ ID NO: 309 - DNA, 1038 bp, synthetic construct
  misc_feature 1..1038: note = Engineered RNA ligase variants
  source 1..1038: mol_type = other DNA
atgcatcaccatcaccatcacggtggcagcggtatgtttgcggaatattcaagtctggaaaaccattacaataataagttcattgagaagatccgtctggcaggcttcgatatgcacaccgtggaatgggtagctcgcgagaagattcatggaacgaactttagcgttatcattactccgaccgaaatcgtcccagccaaacgcacagggccgatcttggaaggcgagtcgttctttggtcacgaaattatcatgaagaaatataaagactccttcgtgaaggtgcagaacatgctgaatgccatggatcttgttagcgtgcaaatctttggcgaatttgcgggtggtggcattcagaaaggcgtcgattacggagacaaagatttctatgtgtttgacatcctgtctgatagcgggaacgagaaagtttactgggatgactatgtcgtcgaatcgtttgcgaccacgctcggtctgaaattagcgcctctgctgggacgtggtagtttcgctgaactgtcccagtacccaaacgatttcaaaagcattgtgaaccgttataatgaattggttgatacgacggacctggaacatgccaataaacacgtctttggtccgcaagcgtcttctgaaactggcatagcagaaggctacgttcttaaacccgtctatccgaagttctttaataatggtacacgcgtggcgattaaatgcaagaactccaaattttcggagaaagccaagagcgacaaaccaattaaagcgaaagtggaactgacggagaacgataaacgtgtgctcgaaatctttagcgagtatgttacctggaatcgcgtcagtaacgtactgtcacatattggctcagtgaccgcaaaagattttgggcgtgttatgggtctgacgatgaaagacatcattaatgaagcagcacgcgaaggccatgatatgctgttcgctgataacccgtcggcggtgaagaaagagctgacctggctcatccagaacacgattcgttccaaatggcacgaagttctggag

SEQ ID NO: 310 - protein, 346 aa, synthetic construct
  REGION 1..346: note = Engineered RNA ligase variants
MHHHHHHGGSGMFAEYSSLENHYNNKFIEKIRLAGFDMHTVEWVAREKIHGTNFSVIITPTEIVPAKRTGPILEGESFFGHEIIMKKYKDSFVKVQNMLNAMDLVSVQIFGEFAGGGIQKGVDYGDKDFYVFDILSDSGNEKVYWDDYVVESFATTLGLKLAPLLGRGSFAELSQYPNDFKSIVNRYNELVDTTDLEHANKHVFGPQASSETGIAEGYVLKPVYPKFFNNGTRVAIKCKNSKFSEKAKSDKPIKAKVELTENDKRVLEIFSEYVTWNRVSNVLSHIGSVTAKDFGRVMGLTMKDIINEAAREGHDMLFADNPSAVKKELTWLIQNTIRSKWHEVLE

SEQ ID NO: 311 - DNA, 1038 bp, synthetic construct
  misc_feature 1..1038: note = Engineered RNA ligase variants
  source 1..1038: mol_type = other DNA
atgcatcaccatcaccatcacggtggcagcggtatgtttgcggaatattcaagtctggaaaaccattacaataataagttcattgagaagatccgtggggcaggcttcgatatgcacaccgtggaatgggtagctcgcgagaagattcatggaacgaactttagcgttatcattactccgaccgaaatcgtcccagccaaacgcacagggccgatcttggaaggcgagtcgttctttggtcacgaaattatcatgggcaaatataaagactccttcgtgaaggtgcagaacatgctgaatgccatggatcttgttagcgtgcaaatctttggcgaatttgcgggtggtggcattcagaaaggcgtcgattacggagacaaagatttctatgtgtttgacatcctgtctgatagcgggaacgagaaagtttactgggatgactatgtagtcgaatcgtttgcaaccggcctcggtctgaaattagcgcctctgctgggacgtggtagtttcgctgaactgtcccagtacccaaacgatttcaaaagcattgtgaaccgttataatgaattggttgatacgacggacctggaacatgccaataaacacgtctttggtccgcaagcgtcttctgaaactggcgtagcagaaggctacgttcttaaacccgtctatccgatcttctttaataatggtacacgcgtggcgattaaatgcaagaactccaaattttcggagaaagccaagagcgacaaaccaattaaagcgaaagtggaactgacggagaacgataaacgtgtgctcgaaatctttagcgagtatgttacctggaatcgcgtcagtaacgtactgtcacatattggctcagtgaccgcaaaagattttgggcgtgttatgggtctgacgatgaaagacatcattaatgaagcagcacgcgaaggccatgatatggctttcgctgataacccgtcggcggtgaagaaagagctgaccattctcatccagaacacgattcgttccaaatggcacgaagttctggag

SEQ ID NO: 312 - protein, 346 aa, synthetic construct
  REGION 1..346: note = Engineered RNA ligase variants
MHHHHHHGGSGMFAEYSSLENHYNNKFIEKIRGAGFDMHTVEWVAREKIHGTNFSVIITPTEIVPAKRTGPILEGESFFGHEIIMGKYKDSFVKVQNMLNAMDLVSVQIFGEFAGGGIQKGVDYGDKDFYVFDILSDSGNEKVYWDDYVVESFATGLGLKLAPLLGRGSFAELSQYPNDFKSIVNRYNELVDTTDLEHANKHVFGPQASSETGVAEGYVLKPVYPIFFNNGTRVAIKCKNSKFSEKAKSDKPIKAKVELTENDKRVLEIFSEYVTWNRVSNVLSHIGSVTAKDFGRVMGLTMKDIINEAAREGHDMAFADNPSAVKKELTILIQNTIRSKWHEVLE

SEQ ID NO: 313 - DNA, 1038 bp, synthetic construct
  misc_feature 1..1038: note = Engineered RNA ligase variants
  source 1..1038: mol_type = other DNA
atgcatcaccatcaccatcacggtggcagcggtatgtttgcgccgtattcaagtctggaaaaccattacaataataagttcattgagaagatccgtggggcaggcttcgatatgcacaccgtggaatgggtagctcgcgagaagattcatggaacgaactttagcgttatcattactccgaccgaaatcgtcccagccaaacgcacagggccgatcttggaaggcgagtcgttctttggtcacgaaattatcatgaagaaatataaagactccttcgtgaaggtgcagaacatgctgaatgccatggatcttgttagcgtgcaaatctttggcgaatttgcgggtggtggcattcagaaaggcgtcgattacggagacaaagatttctatgtgtttgacatcctgtctgatagcgggaacgagaaagtttactgggatgactatgtcgtcgaatcgttttgcaccgggctcggtctgaaattagcgcctctgctgggacgtggtagtttcgctgaactgtcccagtacccaaacgatttcaaaagcattgtgaactactataatgaattggttgatacgacggacctggaacatgccaataaacacgtctttggtccgcaagcgtcttctgaaactggcgtagcagaaggctacgttcttaaacccgtcaatccgaagttctttaataatggtacacgcgtggcgattaaatgcaagaactccaaattttcggagaaagccaagagcgacaaaccaattaaagcgaaagtggaactgacggagaacgataaacgtgtgctcgaaatctttagcgagtatgttacctggaatcgcgtcagtaacgtactgtcacatattggctcagtgaccgcaaaagattttgggcgtgttatgggtctgacgatgaaagacatcattaatgaagcagcacgcgaaggccatgatatgctgttcgctgataacccgtcggcggtgaagaaagagctgacccgcctcatccagaacacgattcgttccaaatggcacgaagttctggag

SEQ ID NO: 314 - protein, 346 aa, synthetic construct
  REGION 1..346: note = Engineered RNA ligase variants
MHHHHHHGGSGMFAPYSSLENHYNNKFIEKIRGAGFDMHTVEWVAREKIHGTNFSVIITPTEIVPAKRTGPILEGESFFGHEIIMKKYKDSFVKVQNMLNAMDLVSVQIFGEFAGGGIQKGVDYGDKDFYVFDILSDSGNEKVYWDDYVVESFCTGLGLKLAPLLGRGSFAELSQYPNDFKSIVNYYNELVDTTDLEHANKHVFGPQASSETGVAEGYVLKPVNPKFFNNGTRVAIKCKNSKFSEKAKSDKPIKAKVELTENDKRVLEIFSEYVTWNRVSNVLSHIGSVTAKDFGRVMGLTMKDIINEAAREGHDMLFADNPSAVKKELTRLIQNTIRSKWHEVLE

SEQ ID NO: 315 - DNA, 1038 bp, synthetic construct
  misc_feature 1..1038: note = Engineered RNA ligase variants
  source 1..1038: mol_type = other DNA
atgcatcaccatcaccatcacggtggcagcggtatgtttgcgtattattcaagtctggaaaaccattacaataataagttcattgagaagatccgtggggcaggcttcgatatgcacaccgtggaatgggtagctcgcgagaagattcatggaacgaactttagcgttatcattactccgaccgaaatcgtcccagccaaacgcacagggccgatcttggaaggcgagtcgttctttggtcacgaaattatcatgaagaaatataaagactccttcgtgaaggtgcagaacatgctgaatgccatggatcttgttagcgtgcaaatctttggcgaatttgcgggtggtggcattcagaaaggcgtcgattacggagacaaagatttctatgtgtttgacatcctgtctgatagcgggaacgagaaagtttactgggatgactatactgtcgaatcgttttgcaccgggctcggtctgaaattagcgcctctgctgggacgtggtagtttcgctgaactgtcccagtacccaaacgatttcaaaagcattgtgaactactataatgaattggttgatacgacggacctggaacatgccaataaacacgtctttggtccgcaagcgtcttctgaaactggcgtagcagaaggctacgttcttaaacccgtcaatccgatcttctttaataatggtacacgcgtggcgattaaatgcaagaactccaaattttcggagaaagccaagagcgacaaaccaattaaagcgaaagtggaactgacggagaacgataaacgtgtgctcgaaatctttagcgagtatgttacctggaatcgcgtcagtaacgtactgtcacatattggctcagtgaccgcaaaagattttgggcgtgttatgggtctgacgatgaaagacatcattaatgaagcagcacgcgaaggccatgatatgctgttcgctgataacccgtcggcggtgaagaaagagctgaccattctcatccagaacacgattcgttccaaatggcacgaagttctggag

SEQ ID NO: 316 - protein, 346 aa, synthetic construct
  REGION 1..346: note = Engineered RNA ligase variants
MHHHHHHGGSGMFAYYSSLENHYNNKFIEKIRGAGFDMHTVEWVAREKIHGTNFSVIITPTEIVPAKRTGPILEGESFFGHEIIMKKYKDSFVKVQNMLNAMDLVSVQIFGEFAGGGIQKGVDYGDKDFYVFDILSDSGNEKVYWDDYTVESFCTGLGLKLAPLLGRGSFAELSQYPNDFKSIVNYYNELVDTTDLEHANKHVFGPQASSETGVAEGYVLKPVNPIFFNNGTRVAIKCKNSKFSEKAKSDKPIKAKVELTENDKRVLEIFSEYVTWNRVSNVLSHIGSVTAKDFGRVMGLTMKDIINEAAREGHDMLFADNPSAVKKELTILIQNTIRSKWHEVLE

SEQ ID NO: 317 - DNA, 1038 bp, synthetic construct
  misc_feature 1..1038: note = Engineered RNA ligase variants
  source 1..1038: mol_type = other DNA
atgcatcaccatcaccatcacggtggcagcggtatgtttgcgtattattcaagtctggaaaaccattacaataataagttcattgagaagatccgtctggcaggcttcgatatgcacaccgtggaatgggtagctcgcgagaagattcatggaacgaactttagcgttatcattactccgaccgaaatcgtcccagccaaacgcacagggccgatcttggaaggcgagtcgttctttggtcacgaaattatcatgaaaaaatataaagactccttcgtgaaggtgcagaacatgctgaatgccatggatcttgttagcgtgcaaatctttggcgaatttgcgggtggtggcattcagaaaggcgtcgattacggagacaaagatttctatgtgtttgacatcctgtctgatagcgggaacgagaaagtttactgggatgactatgtagtcgaatcgtttgcaaccgggctcggtctgaaattagcgcctctgctgggacgtggtagtttcgctgaactgtcccagtacccaaacgatttcaaaagcattgtgaactattataatgaattggttgatacgacgggcctggaacatgccaataaacacgtctttggtccgcaagcgtcttctgaaactggcgtagcagaaggctacgttcttaaacccgtcaatccgatcttctttaataatggtacacgcgtggcgattaaatgcaagaactccaaattttcggagaaagccaagagcgacaaaccaattaaagcgaaagtggaactgacggagaacgataaacgtgtgctcgaaatctttagcgagtatgttacctggaatcgcgtcagtaacgtactgtcacatattggctcagtgaccgcaaaagattttgggcgtgttatgggtctgacgatgaaagacatcattaatgaagcagcacgcgaaggccatgatatgttgttcgctgataacccgtcggcggtgaagaaagagctgaccattctcatccagaacacgattcgttccaaatggcacgaagttctggag

SEQ ID NO: 318 - protein, 346 aa, synthetic construct
  REGION 1..346: note = Engineered RNA ligase variants
MHHHHHHGGSGMFAYYSSLENHYNNKFIEKIRLAGFDMHTVEWVAREKIHGTNFSVIITPTEIVPAKRTGPILEGESFFGHEIIMKKYKDSFVKVQNMLNAMDLVSVQIFGEFAGGGIQKGVDYGDKDFYVFDILSDSGNEKVYWDDYVVESFATGLGLKLAPLLGRGSFAELSQYPNDFKSIVNYYNELVDTTGLEHANKHVFGPQASSETGVAEGYVLKPVNPIFFNNGTRVAIKCKNSKFSEKAKSDKPIKAKVELTENDKRVLEIFSEYVTWNRVSNVLSHIGSVTAKDFGRVMGLTMKDIINEAAREGHDMLFADNPSAVKKELTILIQNTIRSKWHEVLE

SEQ ID NO: 319 - DNA, 1038 bp, synthetic construct
  misc_feature 1..1038: note = Engineered RNA ligase variants
  source 1..1038: mol_type = other DNA
atgcatcaccatcaccatcacggtggcagcggtatgtttgcgatgtattcaagtctggaaaaccattacaataataagttcattgagaagatccgtggtgcaggcttcgatatgcacaccgtggaatgggtagctcgcgagaagattcatggaacgaactttagcgttatcattactccgaccgaaatcgtcccagccaaacgcacagggccgatcttggaaggcgagtcgttctttggtcacgaaattatcatgaaaaaatataaagactccttcgtgaaggtgcagaacatgctgaatgccatggatcttgttagcgtgcaaatctttggcgaatttgcgggtggtggcattcagaaaggcgtcgattacggagacaaagatttctatgtgtttgacatcctgtctgatagcgggaacgagaaagtttactgggatgactatgtagtcgaatcgtttgcaaccggcctcggtctgaaattagcgcctctgctgggacgtggtagtttcgctgaactgtcccagtacccaaacgatttcaaaagcattgtgaactattataatgaattggttgatacgacggacctggaacatgccaataaacacgtctttggtccgcaagcgtcttctgaaactggcgtagcagaaggctacgttcttaaacccgtctatccgaagttctttaataatggtacacgcgtggcgattaaatgcaagaactccaaattttcggagaaagccaagagcgacaaaccaattaaagcgaaagtggaactgacggagaacgataaacgtgtgctcgaaatctttagcgagtatgttacctggaatcgcgtcagtaacgtactgtcacatattggctcagtgaccgcaaaagattttgggcgtgttatgggtctgacgatgaaagacatcattaatgaagcagcacgcgaaggccatgatatggctttcgctgataacccgtcggcggtgaagaaagagctgacctggctcatccagaacacgattcgttccaaatggcacgaagttctggag

SEQ ID NO: 320 - protein, 346 aa, synthetic construct
  REGION 1..346: note = Engineered RNA ligase variants
MHHHHHHGGSGMFAMYSSLENHYNNKFIEKIRGAGFDMHTVEWVAREKIHGTNFSVIITPTEIVPAKRTGPILEGESFFGHEIIMKKYKDSFVKVQNMLNAMDLVSVQIFGEFAGGGIQKGVDYGDKDFYVFDILSDSGNEKVYWDDYVVESFATGLGLKLAPLLGRGSFAELSQYPNDFKSIVNYYNELVDTTDLEHANKHVFGPQASSETGVAEGYVLKPVYPKFFNNGTRVAIKCKNSKFSEKAKSDKPIKAKVELTENDKRVLEIFSEYVTWNRVSNVLSHIGSVTAKDFGRVMGLTMKDIINEAAREGHDMAFADNPSAVKKELTWLIQNTIRSKWHEVLE

SEQ ID NO: 321 - DNA, 1038 bp, synthetic construct
  misc_feature 1..1038: note = Engineered RNA ligase variants
  source 1..1038: mol_type = other DNA
atgcatcaccatcaccatcacggtggcagcggtatgtttgcggaatattcaagtctggaaaaccattacaataataagttcattgagaagatccgtggtgcaggcttcgatatgcacaccgtggaatgggtagctcgcgagaagattcatggaacgaactttagcgttatcattactccgaccgaaatcgtcccagccaaacgcacagggccgatcttggaaggcgagtcgttctttggtcacgaaattatcatgggcaaatataaagactccttcgtgaaggtgcagaacatgctgaatgccatggatcttgttagcgtgcaaatctttggcgaatttgcgggtggtggcattcagaaaggcgtcgattacggagacaaagatttctatgtgtttgacatcctgtctgatagcgggaacgagaaagtttactgggatgactatgtagtcgaatcgtttgcaaccggcctcggtctgaaattagcgcctctgctgggacgtggtagtttcgctgaactgtcccagtacccaaacgatttcaaaagcattgtgaaccgttataatgaattggttgatacgacgggcctggaacatgccaataaacacgtctttggtccgcaagcgtcttctgaaactggcgtagcagaaggctacgttcttaaacccgtcaacccgaaattctttaataatggtacacgcgtggcgattaaatgcaagaactccaaattttcggagaaagccaagagcgacaaaccaattaaagcgaaagtggaactgacggagaacgataaacgtgtgctcgaaatctttagcgagtatgttacctggaatcgcgtcagtaacgtactgtcacatattggctcagtgaccgcaaaagattttgggcgtgttatgggtctgacgatgaaagacatcattaatgaagcagcacgcgaaggccatgatatggctttcgctgataacccgtcggcggtgaagaaagagctgaccattctcatccagaacacgattcgttccaaatggcacgaagttctggag

SEQ ID NO: 322 - protein, 346 aa, synthetic construct
  REGION 1..346: note = Engineered RNA ligase variants
MHHHHHHGGSGMFAEYSSLENHYNNKFIEKIRGAGFDMHTVEWVAREKIHGTNFSVIITPTEIVPAKRTGPILEGESFFGHEIIMGKYKDSFVKVQNMLNAMDLVSVQIFGEFAGGGIQKGVDYGDKDFYVFDILSDSGNEKVYWDDYVVESFATGLGLKLAPLLGRGSFAELSQYPNDFKSIVNRYNELVDTTGLEHANKHVFGPQASSETGVAEGYVLKPVNPKFFNNGTRVAIKCKNSKFSEKAKSDKPIKAKVELTENDKRVLEIFSEYVTWNRVSNVLSHIGSVTAKDFGRVMGLTMKDIINEAAREGHDMAFADNPSAVKKELTILIQNTIRSKWHEVLE

SEQ ID NO: 323 - DNA, 1038 bp, synthetic construct
  misc_feature 1..1038: note = Engineered RNA ligase variants
  source 1..1038: mol_type = other DNA
atgcatcaccatcaccatcacggtggcagcggtatgtttgcgaaatattcaagtctggaaaaccattacaataataagttcattgagaagatccgtggggcaggcttcgatatgcacaccgtggaatgggtagctcgcgagaagattcatggaacgaactttagcgttatcattactccgaccgaaatcgtcccagccaaacgcacagggccgatcttggaaggcgagtcgttctttggtcacgaaattatcatgaagaaatataaagactccttcgtgaaggtgcagaacatgctgaatgccatggatcttgttagcgtgcaaatctttggcgaatttgcgggtggtggcattcagaaaggcgtcgattacggagacaaagatttctatgtgtttgacatcctgtctgatagcgggaacgagaaagtttactgggatgactatgtagtcgaatcgtttgcaaccggcctcggtctgaaattagcgcctctgctgggacgtggtagtttcgctgaactgtcccagtacccaaacgatttcaaaagcattgtgaactattataatgaattggttgatacgacggacctggaacatgccaataaacacgtctttggtccgcaagcgtcttctgaaactggcgtagcagaaggctacgttcttaaacccgtcaatccgatcttctttaataatggtacacgcgtggcgattaaatgcaagaactccaaattttcggagaaagccaagagcgacaaaccaattaaagcgaaagtggaactgacggagaacgataaacgtgtgctcgaaatctttagcgagtatgttacctggaatcgcgtcagtaacgtactgtcacatattggctcagtgaccgcaaaagattttgggcgtgttatgggtctgacgatgaaagacatcattaatgaagcagcacgcgaaggccatgatatggctttcgctgataacccgtcggcggtgaagaaagagctgaccctgctcatccagaacacgattcgttccaaatggcacgaagttctggag

SEQ ID NO: 324 - protein, 346 aa, synthetic construct
  REGION 1..346: note = Engineered RNA ligase variants
MHHHHHHGGSGMFAKYSSLENHYNNKFIEKIRGAGFDMHTVEWVAREKIHGTNFSVIITPTEIVPAKRTGPILEGESFFGHEIIMKKYKDSFVKVQNMLNAMDLVSVQIFGEFAGGGIQKGVDYGDKDFYVFDILSDSGNEKVYWDDYVVESFATGLGLKLAPLLGRGSFAELSQYPNDFKSIVNYYNELVDTTDLEHANKHVFGPQASSETGVAEGYVLKPVNPIFFNNGTRVAIKCKNSKFSEKAKSDKPIKAKVELTENDKRVLEIFSEYVTWNRVSNVLSHIGSVTAKDFGRVMGLTMKDIINEAAREGHDMAFADNPSAVKKELTLLIQNTIRSKWHEVLE

SEQ ID NO: 325 - DNA, 1038 bp, synthetic construct
  misc_feature 1..1038: note = Engineered RNA ligase variants
  source 1..1038: mol_type = other DNA
atgcatcaccatcaccatcacggtggcagcggtatgtttgcgaaatattcaagtctggaaaaccattacaataataagttcattgagaagatccgtggtgcaggcttcgatatgcacaccgtggaatgggtagctcgcgagaagattcatggaacgaactttagcgttatcattactccgaccgaaatcgtcccagccaaacgcacagggccgatcttggaaggcgagtcgttctttggtcacgaaattatcatgaagaaatataaagactccttcgtgaaggtgcagaacatgctgaatgccatggatcttgttagcgtgcaaatctttggcgaatttgcgggtggtggcattcagaaaggcgtcgattacggagacaaagatttctatgtgtttgacatcctgtctgatagcgggaacgagaaagtttactgggatgactatgtagtcgaatcgtttgcaaccggcctcggtctgaaattagcgcctctgctgggacgtggtagtttcgctgaactgtcccagtacccaaacgatttcaaaagcattgtgaactattataatgaattggttgatacgacggacctggaacatgccaataaacacgtctttggtccgcaagcgtcttctgaaactggcgtagcagaaggctacgttcttaaacccgtcaacccgaaattctttaataatggtacacgcgtggcgattaaatgcaagaactccaaattttcggagaaagccaagagcgacaaaccaattaaagcgaaagtggaactgacggagaacgataaacgtgtgctcgaaatctttagcgagtatgttacctggaatcgcgtcagtaacgtactgtcacatattggctcagtgaccgcaaaagattttgggcgtgttatgggtctgacgatgaaagacatcattaatgaagcagcacgcgaaggccatgatatgttgttcgctgataacccgtcggcggtgaagaaagagctgcgtattctcatccagaacacgattcgttccaaatggcacgaagttctggag

SEQ ID NO: 326 - protein, 346 aa, synthetic construct
  REGION 1..346: note = Engineered RNA ligase variants
MHHHHHHGGSGMFAKYSSLENHYNNKFIEKIRGAGFDMHTVEWVAREKIHGTNFSVIITPTEIVPAKRTGPILEGESFFGHEIIMKKYKDSFVKVQNMLNAMDLVSVQIFGEFAGGGIQKGVDYGDKDFYVFDILSDSGNEKVYWDDYVVESFATGLGLKLAPLLGRGSFAELSQYPNDFKSIVNYYNELVDTTDLEHANKHVFGPQASSETGVAEGYVLKPVNPKFFNNGTRVAIKCKNSKFSEKAKSDKPIKAKVELTENDKRVLEIFSEYVTWNRVSNVLSHIGSVTAKDFGRVMGLTMKDIINEAAREGHDMLFADNPSAVKKELRILIQNTIRSKWHEVLE

SEQ ID NO: 327 - DNA, 1038 bp, synthetic construct
  misc_feature 1..1038: note = Engineered RNA ligase variants
  source 1..1038: mol_type = other DNA
atgcatcaccatcaccatcacggtggcagcggtatgtttgcgaaatattcaagtctggaaaaccattacaataataagttcattgagaagatccgtggtgcaggcttcgatatgcacaccgtggaatgggtagctcgcgagaagattcatggaacgaactttagcgttatcattactccgaccgaaatcgtcccagccaaacgcacagggccgatcttggaaggcgagtcgttctttggtcacgaaattatcatgaagaaatattgggactccttcgtgaaggtgcagaacatgctgaatgccatggatcttgttagcgtgcaaatctttggcgaatttgcgggtggtggcattcagaaaggcgtcgattacggagacaaagatttctatgtgtttgacatcctgtctgatagcgggaacgagaaagtttactgggatgactatgtagtcgaatcgtttgcaaccggcctcggtctgaaattagcgcctctgctgggacgtggtagtttcgctgaactgtcccagtacccaaacgatttcaaaagcattgtgaactattataatgaattggttgatacgacggacctggaacatgccaataaacacgtctttggtccgcaagcgtcttctgaaactggcgtagcagaaggctacgttcttaaacccgtcaacccgaaattctttaataatggtacacgcgtggcgattaaatgcaagaactccaaattttcggagaaagccaagagcgacaaaccaattaaagcgaaagtggaactgacggagaacgataaacgtgtgctcgaaatctttagcgagtatgttacctggaatcgcgtcagtaacgtactgtcacatattggctcagtgaccgcaaaagattttgggcgtgttatgggtctgacgatgaaagacatcattaatgaagcagcacgcgaaggccatgatatgttgttcgctgataacccgtcggcggtgaagaaagagctgaccattctcatccagaacacgattcgttccaaatggcacgaagttctggag

SEQ ID NO: 328 - protein, 346 aa, synthetic construct
  REGION 1..346: note = Engineered RNA ligase variants
MHHHHHHGGSGMFAKYSSLENHYNNKFIEKIRGAGFDMHTVEWVAREKIHGTNFSVIITPTEIVPAKRTGPILEGESFFGHEIIMKKYWDSFVKVQNMLNAMDLVSVQIFGEFAGGGIQKGVDYGDKDFYVFDILSDSGNEKVYWDDYVVESFATGLGLKLAPLLGRGSFAELSQYPNDFKSIVNYYNELVDTTDLEHANKHVFGPQASSETGVAEGYVLKPVNPKFFNNGTRVAIKCKNSKFSEKAKSDKPIKAKVELTENDKRVLEIFSEYVTWNRVSNVLSHIGSVTAKDFGRVMGLTMKDIINEAAREGHDMLFADNPSAVKKELTILIQNTIRSKWHEVLE

SEQ ID NO: 329 - DNA, 1038 bp, synthetic construct
  misc_feature 1..1038: note = Engineered RNA ligase variants
  source 1..1038: mol_type = other DNA
atgcatcaccatcaccatcacggtggcagcggtatgtttgcgccgtattcaagtctggaaaaccattacaataataagttcattgagaagatccgtggggcaggcttcgatatgcacaccgtggaatgggtagctcgcgagaagattcatggaacgaactttagcgttatcattactccgaccgaaatcgtcccagccaaacgcacagggccgatcttggaaggcgagtcgttctttggtcacgaaattatcatgaagaaatataaagactccttcgtgaaggtgcagaacatgctgaatgccatggatcttgttagcgtgcaaatctttggcgaatttgcgggtggtggcattcagaaaggcgtcgattacggagacaaagatttctatgtgtttgacatcctgtctgatagcgggaacgagaaagtttactgggatgactatcgcgtcgaatcgtttgcgaccgggctcggtctgaaattagcgcctctgctgggacgtggtagtttcgctgaactgtcccagtacccaaacgatttcaaaagcattgtgaacgactataatgaattggttgatacgacggacctggaacatgccaataaacacgtctttggtccgcaagcgtcttctgaaactggcgtagcagaaggctacgttcttaaacccgtcaatccgaagttctttaataatggtacacgcgtggcgattaaatgcaagaactccaaattttcggagaaagccaagagcgacaaaccaattaaagcgaaagtggaactgacggagaacgataaacgtgtgctcgaaatctttagcgagtatgttacctggaatcgcgtcagtaacgtactgtcacatattggctcagtgaccgcaaaagattttgggcgtgttatgggtctgacgatgaaagacatcattaatgaagcagcacgcgaaggccatgatatgttgttcgctgataacccgtcggcggtgaagaaagagctgaccctgctcatccagaacacgattcgttccaaatggcacgaagttctggag

SEQ ID NO: 330 - protein, 346 aa, synthetic construct
  REGION 1..346: note = Engineered RNA ligase variants
MHHHHHHGGSGMFAPYSSLENHYNNKFIEKIRGAGFDMHTVEWVAREKIHGTNFSVIITPTEIVPAKRTGPILEGESFFGHEIIMKKYKDSFVKVQNMLNAMDLVSVQIFGEFAGGGIQKGVDYGDKDFYVFDILSDSGNEKVYWDDYRVESFATGLGLKLAPLLGRGSFAELSQYPNDFKSIVNDYNELVDTTDLEHANKHVFGPQASSETGVAEGYVLKPVNPKFFNNGTRVAIKCKNSKFSEKAKSDKPIKAKVELTENDKRVLEIFSEYVTWNRVSNVLSHIGSVTAKDFGRVMGLTMKDIINEAAREGHDMLFADNPSAVKKELTLLIQNTIRSKWHEVLE

SEQ ID NO: 331 - DNA, 1038 bp, synthetic construct
  misc_feature 1..1038: note = Engineered RNA ligase variants
  source 1..1038: mol_type = other DNA
atgcatcaccatcaccatcacggtggcagcggtatgtttgcgccgtattcaagtctggaaaaccattacaataataagttcattgagaagatccgtggggcaggcttcgatatgcacaccgtggaatgggtagctcgcgagaagattcatggaacgaactttagcgttatcattactccgaccgaaatcgtcccagccaaacgcacagggccgatcttggaaggcgagtcgttctttggtcacgaaattatcatgaaaaaatataaagactccttcgtgaaggtgcagaacatgctgaatgccatggatcttgttagcgtgcaaatctttggcgaatttgcgggtggtggcattcagaaaggcgtcgattacggagacaaagatttctatgtgtttgacatcctgtctgatagcgggaacgagaaagtttactgggatgactatcgcgtcgaatcgtttgcgaccgggctcggtctgaaattagcgcctctgctgggacgtggtagtttcgctgaactgtcccagtacccaaacgatttcaaaagcattgtgaaccgttataatgaattggttgatacgacggacctggaacatgccaataaacacgtctttggtccgcaagcgtcttctgaaactggcgtagcagaaggctacgttcttaaacccgtcaacccgaaattctttaataatggtacacgcgtggcgattaaatgcaagaactccaaattttcggagaaagccaagagcgacaaaccaattaaagcgaaagtggaactgacggagaacgataaacgtgtgctcgaaatctttagcgagtatgttacctggaatcgcgtcagtaacgtactgtcacatattggctcagtgaccgcaaaagattttgggcgtgttatgggtctgacgatgaaagacatcattaatgaagcagcacgcgaaggccatgatatgctgttcgctgataacccgtcggcggtgaagaaagagctgaccattctcatccagaacacgattcgttccaaatggcacgaagttctggag

SEQ ID NO: 332 - protein, 346 aa, synthetic construct
  REGION 1..346: note = Engineered RNA ligase variants
MHHHHHHGGSGMFAPYSSLENHYNNKFIEKIRGAGFDMHTVEWVAREKIHGTNFSVIITPTEIVPAKRTGPILEGESFFGHEIIMKKYKDSFVKVQNMLNAMDLVSVQIFGEFAGGGIQKGVDYGDKDFYVFDILSDSGNEKVYWDDYRVESFATGLGLKLAPLLGRGSFAELSQYPNDFKSIVNRYNELVDTTDLEHANKHVFGPQASSETGVAEGYVLKPVNPKFFNNGTRVAIKCKNSKFSEKAKSDKPIKAKVELTENDKRVLEIFSEYVTWNRVSNVLSHIGSVTAKDFGRVMGLTMKDIINEAAREGHDMLFADNPSAVKKELTILIQNTIRSKWHEVLE

SEQ ID NO: 333 - DNA, 1038 bp, synthetic construct
  misc_feature 1..1038: note = Engineered RNA ligase variants
  source 1..1038: mol_type = other DNA
atgcatcaccatcaccatcacggtggcagcggtatgtttgcgaaatattcaagtctggaaaaccattacaataataagttcattgagaagatccgtggtgcaggcttcgatatgcacaccgtggaatgggtagctcgcgagaagattcatggaacgaactttagcgttatcattactccgaccgaaatcgtcccagccaaacgcacagggccgatcttggaaggcgagtcgttctttggtcacgaaattatcatgaagaaatatatggactccttcgtgaaggtgcagaacatgctgaatgccatggatcttgttagcgtgcaaatctttggcgaatttgcgggtggtggcattcagaaaggcgtcgattacggagacaaagatttctatgtgtttgacatcctgtctgatagcgggaacgagaaagtttactgggatgactatgtagtcgaatcgtttgcaaccggcctcggtctgaaattagcgcctctgctgggacgtggtagtttcgctgaactgtcccagtacccaaacgatttcaaaagcattgtgaactattataatgaattggttgatacgacggacctggaacatgccaataaacacgtctttggtccgcaagcgtcttctgaaactggcgtagcagaaggctacgttcttaaacccgtcaacccgaaattctttaataatggtacacgcgtggcgattaaatgcaagaactccaaattttcggagaaagccaagagcgacaaaccaattaaagcgaaagtggaactgacggagaacgataaacgtgtgctcgaaatctttagcgagtatgttacctggaatcgcgtcagtaacgtactgtcacatattggctcagtgaccgcaaaagattttgggcgtgttatgggtctgacgatgaaagacatcattaatgaagcagcacgcgaaggccatgatatgttgttcgctgataacccgtcggcggtgaagaaagagctgaccattctcatccagaacacgattcgttccaaatggcacgaagttctggag

SEQ ID NO: 334 - protein, 346 aa, synthetic construct
  REGION 1..346: note = Engineered RNA ligase variants
MHHHHHHGGSGMFAKYSSLENHYNNKFIEKIRGAGFDMHTVEWVAREKIHGTNFSVIITPTEIVPAKRTGPILEGESFFGHEIIMKKYMDSFVKVQNMLNAMDLVSVQIFGEFAGGGIQKGVDYGDKDFYVFDILSDSGNEKVYWDDYVVESFATGLGLKLAPLLGRGSFAELSQYPNDFKSIVNYYNELVDTTDLEHANKHVFGPQASSETGVAEGYVLKPVNPKFFNNGTRVAIKCKNSKFSEKAKSDKPIKAKVELTENDKRVLEIFSEYVTWNRVSNVLSHIGSVTAKDFGRVMGLTMKDIINEAAREGHDMLFADNPSAVKKELTILIQNTIRSKWHEVLE

SEQ ID NO: 335 - DNA, 1038 bp, synthetic construct
  misc_feature 1..1038: note = Engineered RNA ligase variants
  source 1..1038: mol_type = other DNA
atgcatcaccatcaccatcacggtggcagcggtatgtttgcgaaatattcaagtctggaaaaccattacaataataagttcattgagaagatccgtggtgcaggcttcgatatgcacaccgtggaatgggtagctcgcgagaagattcatggaacgaactttagcgttatcattactccgaccgaaatcgtcccagccaaacgcacagggccgatcttggaaggcgagtcgttctttggtcacgaaattatcatgaagaaatataaagactccttcgtgaaggtgcagaacatgctgaatgccatggatcttgttagcgtgcaaatctttggcgaatttgcgggtggtggcattcagaaaggcgtcgattacggagacaaagatttctatgtgtttgacatcctgtctgatagcgggaacgagaaagtttactgggatgactatgtcgtcgaatcgtttgcgaccacgctcggtctgaaattagcgcctctgctgggacgtggtagtttcgctgaactgtcccagtacccaaacgatttcaaaagcattgtgaactattataatgaattggttgatacgacgggcctggaacatgccaataaacacgtctttggtccgcaagcgtcttctgaaactggcgtagcagaaggctacgttcttaaacccgtcaatccgaagttctttaataatggtacacgcgtggcgattaaatgcaagaactccaaattttcggagaaagccaagagcgacaaaccaattaaagcgaaagtggaactgacggagaacgataaacgtgtgctcgaaatctttagcgagtatgttacctggaatcgcgtcagtaacgtactgtcacatattggctcagtgaccgcaaaagattttgggcgtgttatgggtctgacgatgaaagacatcattaatgaagcagcacgcgaaggccatgatatgctgttcgctgataacccgtcggcggtgaagaaagagctgaccctgctcatccagaacacgattcgttccaaatggcacgaagttctggag

SEQ ID NO: 336 - protein, 346 aa, synthetic construct
  REGION 1..346: note = Engineered RNA ligase variants
MHHHHHHGGSGMFAKYSSLENHYNNKFIEKIRGAGFDMHTVEWVAREKIHGTNFSVIITPTEIVPAKRTGPILEGESFFGHEIIMKKYKDSFVKVQNMLNAMDLVSVQIFGEFAGGGIQKGVDYGDKDFYVFDILSDSGNEKVYWDDYVVESFATTLGLKLAPLLGRGSFAELSQYPNDFKSIVNYYNELVDTTGLEHANKHVFGPQASSETGVAEGYVLKPVNPKFFNNGTRVAIKCKNSKFSEKAKSDKPIKAKVELTENDKRVLEIFSEYVTWNRVSNVLSHIGSVTAKDFGRVMGLTMKDIINEAAREGHDMLFADNPSAVKKELTLLIQNTIRSKWHEVLE

SEQ ID NO: 337 - DNA, 1038 bp, synthetic construct
  misc_feature 1..1038: note = Engineered RNA ligase variants
  source 1..1038: mol_type = other DNA
atgcatcaccatcaccatcacggtggcagcggtatgtttgcgaaatattcaagtctggaaaaccattacaataataagttcattgagaagatccgtggtgcaggcttcgatatgcacaccgtggaatgggtagctcgcgagaagattcatggaacgaactttagcgttatcattactccgaccgaaatcgtcccagccaaacgcacagggccgatcttggaaggcgagtcgttctttggtcacgaaattatcatgaagaaatataaagactccttcgtgaaggtgcagaacatgctgaatgccatggatcttgttagcgtgcaaatctttggcgaatttgcgggtggtggcattcagaaaggcgtcgattacggagacaaagatttctatgtgtttgacatcctgtctgatagcgggaacgagaaagtttactgggatgactatgtagtcgaatcgtttgcaaccgctctcggtctgaaattagcgcctctgctgggacgtggtagtttcgctgaactgtcccagtacccaaacgatttcaaaagcattgtgaactattataatgaattggttgatacgacggacctggaacatgccaataaacacgtctttggtccgcaagcgtcttctgaaactggcgtagcagaaggctacgttcttaaacccgtcaacccgaaattctttaataatggtacacgcgtggcgattaaatgcaagaactccaaattttcggagaaagccaagagcgacaaaccaattaaagcgaaagtggaactgacggagaacgataaacgtgtgctcgaaatctttagcgagtatgttacctggaatcgcgtcagtaacgtactgtcacatattggctcagtgaccgcaaaagattttgggcgtgttatgggtctgacgatgaaagacatcattaatgaagcagcacgcgaaggccatgatatgttgttcgctgataacccgtcggcggtgaagaaagagctgaccattctcatccagaacacgattcgttccaaatggcacgaagttctggag

SEQ ID NO: 338 - protein, 346 aa, synthetic construct
  REGION 1..346: note = Engineered RNA ligase variants
MHHHHHHGGSGMFAKYSSLENHYNNKFIEKIRGAGFDMHTVEWVAREKIHGTNFSVIITPTEIVPAKRTGPILEGESFFGHEIIMKKYKDSFVKVQNMLNAMDLVSVQIFGEFAGGGIQKGVDYGDKDFYVFDILSDSGNEKVYWDDYVVESFATALGLKLAPLLGRGSFAELSQYPNDFKSIVNYYNELVDTTDLEHANKHVFGPQASSETGVAEGYVLKPVNPKFFNNGTRVAIKCKNSKFSEKAKSDKPIKAKVELTENDKRVLEIFSEYVTWNRVSNVLSHIGSVTAKDFGRVMGLTMKDIINEAAREGHDMLFADNPSAVKKELTILIQNTIRSKWHEVLE

SEQ ID NO: 339 - DNA, 1038 bp, synthetic construct
  misc_feature 1..1038: note = Engineered RNA ligase variants
  source 1..1038: mol_type = other DNA
atgcatcaccatcaccatcacggtggcagcggtatgtttgcggaatattcaagtctggaaaaccattacaataataagttcattgagaagatccgtggggcaggcttcgatatgcacaccgtggaatgggtagctcgcgagaagattcatggaacgaactttagcgttatcattactccgaccgaaatcgtcccagccaaacgcacagggccgatcttggaaggcgagtcgttctttggtcacgaaattatcatgggcaaatataaagactccttcgtgaaggtgcagaacatgctgaatgccatggatcttgttagcgtgcaaatctttggcgaatttgcgggtggtggcattcagaaaggcgtcgattacggagacaaagatttctatgtgtttgacatcctgtctgatagcgggaacgagaaagtttactgggatgactatgtcgtcgaatcgtttgcgaccacgctcggtctgaaattagcgcctctgctgggacgtggtagtttcgctgaactgtcccagtacccaaacgatttcaaaagcattgtgaaccgttataatgaattggttgatacgacggacctggaacatgccaataaacacgtctttggtccgcaagcgtcttctgaaactggcgtagcagaaggctacgttcttaaacccgtcaacccgaaattctttaataatggtacacgcgtggcgattaaatgcaagaactccaaattttcggagaaagccaagagcgacaaaccaattaaagcgaaagtggaactgacggagaacgataaacgtgtgctcgaaatctttagcgagtatgttacctggaatcgcgtcagtaacgtactgtcacatattggctcagtgaccgcaaaagattttgggcgtgttatgggtctgacgatgaaagacatcattaatgaagcagcacgcgaaggccatgatatgctgttcgctgataacccgtcggcggtgaagaaagagctgacccgcctcatccagaacacgattcgttccaaatggcacgaagttctggag

SEQ ID NO: 340 - protein, 346 aa, synthetic construct
  REGION 1..346: note = Engineered RNA ligase variants
MHHHHHHGGSGMFAEYSSLENHYNNKFIEKIRGAGFDMHTVEWVAREKIHGTNFSVIITPTEIVPAKRTGPILEGESFFGHEIIMGKYKDSFVKVQNMLNAMDLVSVQIFGEFAGGGIQKGVDYGDKDFYVFDILSDSGNEKVYWDDYVVESFATTLGLKLAPLLGRGSFAELSQYPNDFKSIVNRYNELVDTTDLEHANKHVFGPQASSETGVAEGYVLKPVNPKFFNNGTRVAIKCKNSKFSEKAKSDKPIKAKVELTENDKRVLEIFSEYVTWNRVSNVLSHIGSVTAKDFGRVMGLTMKDIINEAAREGHDMLFADNPSAVKKELTRLIQNTIRSKWHEVLE

SEQ ID NO: 341 - DNA, 1038 bp, synthetic construct
  misc_feature 1..1038: note = Engineered RNA ligase variants
  source 1..1038: mol_type = other DNA
atgcatcaccatcaccatcacggtggcagcggtatgtttgcgaaatattcaagtctggaaaaccattacaataataagttcattgagaagatccgtggtgcaggcttcgatatgcacaccgtggaatgggtagctcgcgagaagattcatggaacgaactttagcgttatcattactccgaccgaaatcgtcccagccaaacgcacagggccgatcttggaaggcgagtcgttctttggtcacgaaattatcatgaagaaatataaagactccttcgtgaaggtgcagaacatgctgaatgccatggatcttgttagcgtgcaaatctttggcgaatttgcgggtggtggcattcagaaaggcgtcgattacggagacaaagatttctatgtgtttgacatcctgtctgatagcgggaacgagaaagtttactgggatgactatgtagtcgaatcgtttgcaaccggcctcggtctgaaattagcgcctctgctgggacgtggtagtttcgctgaactgtcccagtacccaaacgatttcaaaagcattgtgaactactataatgaattggttgatacgacgggcctggaacatgccaataaacacgtctttggtccgcaagcgtcttctgaaactggcgtagcagaaggctacgttcttaaacccgtcaacccgaaattctttaataatggtacacgcgtggcgattaaatgcaagaactccaaattttcggagaaagccaagagcgacaaaccaattaaagcgaaagtggaactgacggagaacgataaacgtgtgctcgaaatctttagcgagtatgttacctggaatcgcgtcagtaacgtactgtcacatattggctcagtgaccgcaaaagattttgggcgtgttatgggtctgacgatgaaagacatcattaatgaagcagcacgcgaaggccatgatatgttgttcgctgataacccgtcggcggtgaagaaagagctgacctggctcatccagaacacgattcgttccaaatggcacgaagttctggag

SEQ ID NO: 342 - protein, 346 aa, synthetic construct
  REGION 1..346: note = Engineered RNA ligase variants
MHHHHHHGGSGMFAKYSSLENHYNNKFIEKIRGAGFDMHTVEWVAREKIHGTNFSVIITPTEIVPAKRTGPILEGESFFGHEIIMKKYKDSFVKVQNMLNAMDLVSVQIFGEFAGGGIQKGVDYGDKDFYVFDILSDSGNEKVYWDDYVVESFATGLGLKLAPLLGRGSFAELSQYPNDFKSIVNYYNELVDTTGLEHANKHVFGPQASSETGVAEGYVLKPVNPKFFNNGTRVAIKCKNSKFSEKAKSDKPIKAKVELTENDKRVLEIFSEYVTWNRVSNVLSHIGSVTAKDFGRVMGLTMKDIINEAAREGHDMLFADNPSAVKKELTWLIQNTIRSKWHEVLE

SEQ ID NO: 343 - DNA, 1038 bp, synthetic construct
  misc_feature 1..1038: note = Engineered RNA ligase variants
  source 1..1038: mol_type = other DNA
atgcatcaccatcaccatcacggtggcagcggtatgtttgcgaaatattcaagtctggaaaaccattacaataataagttcattgagaagatccgtggtgcaggcttcgatatgcacaccgtggaatgggtagctcgcgagaagattcatggaacgaactttagcgttatcattactccgaccgaaatcgtcccagccaaacgcacagggccgatcttggaaggcgagtcgttctttggtcacgaaattatcatgaagaaatataaagactccttcgtgaaggtgcagaacatgctgaatgccatggatcttgttagcgtgcaaatctttggcgaatttgcgggtggtggcattcagaaaggcgtcgattacggagacaaagatttctatgtgtttgacatcctgtctgatagcgggaacgagaaagtttactgggatgactatgtagtcgaatcgtttgcaaccggcctcggtctgaaattagcgcctctgctgggacgtggtagtttcgctgaactgtcccagtacccaaacgatttcaaaagcattgtgaactattataatgaattggttgatacgacggacctggaacatgccaataaacacgtctttggtccgcaagcgtcttctgaaactggcgtagcagaaggctacgttcttaaacccgtcaacccgaaattctttaataatggtacacgcgtggcgattaaatgcaagaactccaaattttcggagaaagccaagagcgacaaaccaattaaagcgaaagtggaactgacggagaacgataaacgtgtgctcgaaatctttagcgagtatgttaattggaatcgcgtcagtaacgtactgtcacatattggctcagtgaccgcaaaagattttgggcgtgttatgggtctgacgatgaaagacatcattaatgaagcagcacgcgaaggccatgatatgttgttcgctgataacccgtcggcggtgaagaaagagctgaccattctcatccagaacacgattcgttccaaatggcacgaagttctggag

SEQ ID NO: 344 - protein, 346 aa, synthetic construct
  REGION 1..346: note = Engineered RNA ligase variants
MHHHHHHGGSGMFAKYSSLENHYNNKFIEKIRGAGFDMHTVEWVAREKIHGTNFSVIITPTEIVPAKRTGPILEGESFFGHEIIMKKYKDSFVKVQNMLNAMDLVSVQIFGEFAGGGIQKGVDYGDKDFYVFDILSDSGNEKVYWDDYVVESFATGLGLKLAPLLGRGSFAELSQYPNDFKSIVNYYNELVDTTDLEHANKHVFGPQASSETGVAEGYVLKPVNPKFFNNGTRVAIKCKNSKFSEKAKSDKPIKAKVELTENDKRVLEIFSEYVNWNRVSNVLSHIGSVTAKDFGRVMGLTMKDIINEAAREGHDMLFADNPSAVKKELTILIQNTIRSKWHEVLE

SEQ ID NO: 345 - DNA, 1038 bp, synthetic construct
  misc_feature 1..1038: note = Engineered RNA ligase variants
  source 1..1038: mol_type = other DNA
atgcatcaccatcaccatcacggtggcagcggtatgtttgcgccgtattcaagtctggaaaaccattacaataataagttcattgagaagatccgtctggcaggcttcgatatgcacaccgtggaatgggtagctcgcgagaagattcatggaacgaactttagcgttatcattactccgaccgaaatcgtcccagccaaacgcacagggccgatcttggaaggcgagtcgttctttggtcacgaaattatcatgaaaaaatataaagactccttcgtgaaggtgcagaacatgctgaatgccatggatcttgttagcgtgcaaatctttggcgaatttgcgggtggtggcattcagaaaggcgtcgattacggagacaaagatttctatgtgtttgacatcctgtctgatagcgggaacgagaaagtttactgggatgactatgtagtcgaatcgtttgcaaccgggctcggtctgaaattagcgcctctgctgggacgtggtagtttcgctgaactgtcccagtacccaaacgatttcaaaagcattgtgaaccgttataatgaattggttgatacgacggacctggaacatgccaataaacacgtctttggtccgcaagcgtcttctgaaactggcgtagcagaaggctacgttcttaaacccgtctatccgaagttctttaataatggtacacgcgtggcgattaaatgcaagaactccaaattttcggagaaagccaagagcgacaaaccaattaaagcgaaagtggaactgacggagaacgataaacgtgtgctcgaaatctttagcgagtatgttacctggaatcgcgtcagtaacgtactgtcacatattggctcagtgaccgcaaaagattttgggcgtgttatgggtctgacgatgaaagacatcattaatgaagcagcacgcgaaggccatgatatgctgttcgctgataacccgtcggcggtgaagaaagagctgaccattctcatccagaacacgattcgttccaaatggcacgaagttctggag

SEQ ID NO: 346 - protein, 346 aa, synthetic construct
  REGION 1..346: note = Engineered RNA ligase variants
MHHHHHHGGSGMFAPYSSLENHYNNKFIEKIRLAGFDMHTVEWVAREKIHGTNFSVIITPTEIVPAKRTGPILEGESFFGHEIIMKKYKDSFVKVQNMLNAMDLVSVQIFGEFAGGGIQKGVDYGDKDFYVFDILSDSGNEKVYWDDYVVESFATGLGLKLAPLLGRGSFAELSQYPNDFKSIVNRYNELVDTTDLEHANKHVFGPQASSETGVAEGYVLKPVYPKFFNNGTRVAIKCKNSKFSEKAKSDKPIKAKVELTENDKRVLEIFSEYVTWNRVSNVLSHIGSVTAKDFGRVMGLTMKDIINEAAREGHDMLFADNPSAVKKELTILIQNTIRSKWHEVLE

SEQ ID NO: 347 - DNA, 1038 bp, synthetic construct
  misc_feature 1..1038: note = Engineered RNA ligase variants
  source 1..1038: mol_type = other DNA
atgcatcaccatcaccatcacggtggcagcggtatgtttgcggaatattcaagtctggaaaaccattacaataataagttcattgagaagatccgtggggcaggcttcgatatgcacaccgtggaatgggtagctcgcgagaagattcatggaacgaactttagcgttatcattactccgaccgaaatcgtcccagccaaacgcacagggccgatcttggaaggcgagtcgttctttggtcacgaaattatcatgaagaaatataaagactccttcgtgaaggtgcagaacatgctgaatgccatggatcttgttagcgtgcaaatctttggcgaatttgcgggtggtggcattcagaaaggcgtcgattacggagacaaagatttctatgtgtttgacatcctgtctgatagcgggaacgagaaagtttactgggatgactatgtagtcgaatcgtttgcaaccggcctcggtctgaaattagcgcctctgctgggacgtggtagtttcgctgaactgtcccagtacccaaacgatttcaaaagcattgtgaaccgttataatgaattggttgatacgacggacctggaacatgccaataaacacgtctttggtccgcaagcgtcttctgaaactggcgtagcagaaggctacgttcttaaacccgtcaatccgaagttctttaataatggtacacgcgtggcgattaaatgcaagaactccaaattttcggagaaagccaagagcgacaaaccaattaaagcgaaagtggaactgacggagaacgataaacgtgtgctcgaaatctttagcgagtatgttacctggaatcgcgtcagtaacgtactgtcacatattggctcagtgaccgcaaaagattttgggcgtgttatgggtctgacgatgaaagacatcattaatgaagcagcacgcgaaggccatgatatggctttcgctgataacccgtcggcggtgaagaaagagctgaccattctcatccagaacacgattcgttccaaatggcacgaagttctggag

SEQ ID NO: 348 - protein, 346 aa, synthetic construct
  REGION 1..346: note = Engineered RNA ligase variants
MHHHHHHGGSGMFAEYSSLENHYNNKFIEKIRGAGFDMHTVEWVAREKIHGTNFSVIITPTEIVPAKRTGPILEGESFFGHEIIMKKYKDSFVKVQNMLNAMDLVSVQIFGEFAGGGIQKGVDYGDKDFYVFDILSDSGNEKVYWDDYVVESFATGLGLKLAPLLGRGSFAELSQYPNDFKSIVNRYNELVDTTDLEHANKHVFGPQASSETGVAEGYVLKPVNPKFFNNGTRVAIKCKNSKFSEKAKSDKPIKAKVELTENDKRVLEIFSEYVTWNRVSNVLSHIGSVTAKDFGRVMGLTMKDIINEAAREGHDMAFADNPSAVKKELTILIQNTIRSKWHEVLE

SEQ ID NO: 349 - DNA, 1038 bp, synthetic construct
  misc_feature 1..1038: note = Engineered RNA ligase variants
  source 1..1038: mol_type = other DNA
atgcatcaccatcaccatcacggtggcagcggtatgtttgcgatgtattcaagtctggaaaaccattacaataataagttcattgagaagatccgtctggcaggcttcgatatgcacaccgtggaatgggtagctcgcgagaagattcatggaacgaactttagcgttatcattactccgaccgaaatcgtcccagccaaacgcacagggccgatcttggaaggcgagtcgttctttggtcacgaaattatcatgaagaaatataaagactccttcgtgaaggtgcagaacatgctgaatgccatggatcttgttagcgtgcaaatctttggcgaatttgcgggtggtggcattcagaaaggcgtcgattacggagacaaagatttctatgtgtttgacatcctgtctgatagcgggaacgagaaagtttactgggatgactatgtagtcgaatcgtttgcgaccgggctcggtctgaaattagcgcctctgctgggacgtggtagtttcgctgaactgtcccagtacccaaacgatttcaaaagcattgtgaaccgttataatgaattggttgatacgacggacctggaacatgccaataaacacgtctttggtccgcaagcgtcttctgaaactggcgtagcagaaggctacgttcttaaacccgtcaatccgatcttctttaataatggtacacgcgtggcgattaaatgcaagaactccaaattttcggagaaagccaagagcgacaaaccaattaaagcgaaagtggaactgacggagaacgataaacgtgtgctcgaaatctttagcgagtatgttacctggaatcgcgtcagtaacgtactgtcacatattggctcagtgaccgcaaaagattttgggcgtgttatgggtctgacgatgaaagacatcattaatgaagcagcacgcgaaggccatgatatggctttcgctgataacccgtcggcggtgaagaaagagctgaccattctcatccagaacacgattcgttccaaatggcacgaagttctggag

SEQ ID NO: 350 - protein, 346 aa, synthetic construct
  REGION 1..346: note = Engineered RNA ligase variants
MHHHHHHGGSGMFAMYSSLENHYNNKFIEKIRLAGFDMHTVEWVAREKIHGTNFSVIITPTEIVPAKRTGPILEGESFFGHEIIMKKYKDSFVKVQNMLNAMDLVSVQIFGEFAGGGIQKGVDYGDKDFYVFDILSDSGNEKVYWDDYVVESFATGLGLKLAPLLGRGSFAELSQYPNDFKSIVNRYNELVDTTDLEHANKHVFGPQASSETGVAEGYVLKPVNPIFFNNGTRVAIKCKNSKFSEKAKSDKPIKAKVELTENDKRVLEIFSEYVTWNRVSNVLSHIGSVTAKDFGRVMGLTMKDIINEAAREGHDMAFADNPSAVKKELTILIQNTIRSKWHEVLE

SEQ ID NO: 351 - DNA, 1038 bp, synthetic construct
  misc_feature 1..1038: note = Engineered RNA ligase variants
  source 1..1038: mol_type = other DNA
atgcatcaccatcaccatcacggtggcagcggtatgtttgcgaaatattcaagtctggaaaaccattacaataataagttcattgagaagatccgtggtgcaggcttcgatatgcacaccgtggaatgggtagctcgcgagaagattcatggaacgaactttagcgttatcattactccgaccgaaatcgtcccagccaaacgcacagggccgatcttggaaggcgagtcgttctttggtcacgaaattatcatgaagaaatatggggactccttcgtgaaggtgcagaacatgctgaatgccatggatcttgttagcgtgcaaatctttggcgaatttgcgggtggtggcattcagaaaggcgtcgattacggagacaaagatttctatgtgtttgacatcctgtctgatagcgggaacgagaaagtttactgggatgactatgtagtcgaatcgtttgcaaccggcctcggtctgaaattagcgcctctgctgggacgtggtagtttcgctgaactgtcccagtacccaaacgatttcaaaagcattgtgaactattataatgaattggttgatacgacggacctggaacatgccaataaacacgtctttggtccgcaagcgtcttctgaaactggcgtagcagaaggctacgttcttaaacccgtcaacccgaaattctttaataatggtacacgcgtggcgattaaatgcaagaactccaaattttcggagaaagccaagagcgacaaaccaattaaagcgaaagtggaactgacggagaacgataaacgtgtgctcgaaatctttagcgagtatgttacctggaatcgcgtcagtaacgtactgtcacatattggctcagtgaccgcaaaagattttgggcgtgttatgggtctgacgatgaaagacatcattaatgaagcagcacgcgaaggccatgatatgttgttcgctgataacccgtcggcggtgaagaaagagctgaccattctcatccagaacacgattcgttccaaatggcacgaagttctggag

SEQ ID NO: 352 - protein, 346 aa, synthetic construct
  REGION 1..346: note = Engineered RNA ligase variants
MHHHHHHGGSGMFAKYSSLENHYNNKFIEKIRGAGFDMHTVEWVAREKIHGTNFSVIITPTEIVPAKRTGPILEGESFFGHEIIMKKYGDSFVKVQNMLNAMDLVSVQIFGEFAGGGIQKGVDYGDKDFYVFDILSDSGNEKVYWDDYVVESFATGLGLKLAPLLGRGSFAELSQYPNDFKSIVNYYNELVDTTDLEHANKHVFGPQASSETGVAEGYVLKPVNPKFFNNGTRVAIKCKNSKFSEKAKSDKPIKAKVELTENDKRVLEIFSEYVTWNRVSNVLSHIGSVTAKDFGRVMGLTMKDIINEAAREGHDMLFADNPSAVKKELTILIQNTIRSKWHEVLE

SEQ ID NO: 353 - DNA, 1038 bp, synthetic construct
  misc_feature 1..1038: note = Engineered RNA ligase variants
  source 1..1038: mol_type = other DNA
atgcatcaccatcaccatcacggtggcagcggtatgtttgcgtattattcaagtctggaaaaccattacaataataagttcattgagaagatccgtggggcaggcttcgatatgcacaccgtggaatgggtagctcgcgagaagattcatggaacgaactttagcgttatcattactccgaccgaaatcgtcccagccaaacgcacagggccgatcttggaaggcgagtcgttctttggtcacgaaattatcatgaaaaaatataaagactccttcgtgaaggtgcagaacatgctgaatgccatggatcttgttagcgtgcaaatctttggcgaatttgcgggtggtggcattcagaaaggcgtcgattacggagacaaagatttctatgtgtttgacatcctgtctgatagcgggaacgagaaagtttactgggatgactatcgcgtcgaatcgttttgcaccacgctcggtctgaaattagcgcctctgctgggacgtggtagtttcgctgaactgtcccagtacccaaacgatttcaaaagcattgtgaactattataatgaattggttgatacgacggacctggaacatgccaataaacacgtctttggtccgcaagcgtcttctgaaactggcgtagcagaaggctacgttcttaaacccgtcaatccgaagttctttaataatggtacacgcgtggcgattaaatgcaagaactccaaattttcggagaaagccaagagcgacaaaccaattaaagcgaaagtggaactgacggagaacgataaacgtgtgctcgaaatctttagcgagtatgttacctggaatcgcgtcagtaacgtactgtcacatattggctcagtgaccgcaaaagattttgggcgtgttatgggtctgacgatgaaagacatcattaatgaagcagcacgcgaaggccatgatatgctgttcgctgataacccgtcggcggtgaagaaagagctgacctggctcatccagaacacgattcgttccaaatggcacgaagttctggag

SEQ ID NO: 354 - protein, 346 aa, synthetic construct
  REGION 1..346: note = Engineered RNA ligase variants
MHHHHHHGGSGMFAYYSSLENHYNNKFIEKIRGAGFDMHTVEWVAREKIHGTNFSVIITPTEIVPAKRTGPILEGESFFGHEIIMKKYKDSFVKVQNMLNAMDLVSVQIFGEFAGGGIQKGVDYGDKDFYVFDILSDSGNEKVYWDDYRVESFCTTLGLKLAPLLGRGSFAELSQYPNDFKSIVNYYNELVDTTDLEHANKHVFGPQASSETGVAEGYVLKPVNPKFFNNGTRVAIKCKNSKFSEKAKSDKPIKAKVELTENDKRVLEIFSEYVTWNRVSNVLSHIGSVTAKDFGRVMGLTMKDIINEAAREGHDMLFADNPSAVKKELTWLIQNTIRSKWHEVLE

SEQ ID NO: 355 - DNA, 1038 bp, synthetic construct
  misc_feature 1..1038: note = Engineered RNA ligase variants
  source 1..1038: mol_type = other DNA
atgcatcaccatcaccatcacggtggcagcggtatgtttgcgtattattcaagtctggaaaaccattacaataataagttcattgagaagatccgtggtgcaggcttcgatatgcacaccgtggaatgggtagctcgcgagaagattcatggaacgaactttagcgttatcattactccgaccgaaatcgtcccagccaaacgcacagggccgatcttggaaggcgagtcgttctttggtcacgaaattatcatgaagaaatataaagactccttcgtgaaggtgcagaacatgctgaatgccatggatcttgttagcgtgcaaatctttggcgaatttgcgggtggtggcattcagaaaggcgtcgattacggagacaaagatttctatgtgtttgacatcctgtctgatagcgggaacgagaaagtttactgggatgactatgtcgtcgaatcgttttgcaccgggctcggtctgaaattagcgcctctgctgggacgtggtagtttcgctgaactgtcccagtacccaaacgatttcaaaagcattgtgaactactataatgaattggttgatacgacggacctggaacatgccaataaacacgtctttggtccgcaagcgtcttctgaaactggcgtagcagaaggctacgttcttaaacccgtcaatccgatcttctttaataatggtacacgcgtggcgattaaatgcaagaactccaaattttcggagaaagccaagagcgacaaaccaattaaagcgaaagtggaactgacggagaacgataaacgtgtgctcgaaatctttagcgagtatgttacctggaatcgcgtcagtaacgtactgtcacatattggctcagtgaccgcaaaagattttgggcgtgttatgggtctgacgatgaaagacatcattaatgaagcagcacgcgaaggccatgatatggctttcgctgataacccgtcggcggtgaagaaagagctgaccattctcatccagaacacgattcgttccaaatggcacgaagttctggag

SEQ ID NO: 356 - protein, 346 aa, synthetic construct
  REGION 1..346: note = Engineered RNA ligase variants
MHHHHHHGGSGMFAYYSSLENHYNNKFIEKIRGAGFDMHTVEWVAREKIHGTNFSVIITPTEIVPAKRTGPILEGESFFGHEIIMKKYKDSFVKVQNMLNAMDLVSVQIFGEFAGGGIQKGVDYGDKDFYVFDILSDSGNEKVYWDDYVVESFCTGLGLKLAPLLGRGSFAELSQYPNDFKSIVNYYNELVDTTDLEHANKHVFGPQASSETGVAEGYVLKPVNPIFFNNGTRVAIKCKNSKFSEKAKSDKPIKAKVELTENDKRVLEIFSEYVTWNRVSNVLSHIGSVTAKDFGRVMGLTMKDIINEAAREGHDMAFADNPSAVKKELTILIQNTIRSKWHEVLE

SEQ ID NO: 357 - DNA, 1038 bp, synthetic construct
  misc_feature 1..1038: note = Engineered RNA ligase variants
  source 1..1038: mol_type = other DNA
atgcatcaccatcaccatcacggtggcagcggtatgtttgcgtattattcaagtctggaaaaccattacaataataagttcattgagaagatccgtggtgcaggcttcgatatgcacaccgtggaatgggtagctcgcgagaagattcatggaacgaactttagcgttatcattactccgaccgaaatcgtcccagccaaacgcacagggccgatcttggaaggcgagtcgttctttggtcacgaaattatcatgggcaaatataaagactccttcgtgaaggtgcagaacatgctgaatgccatggatcttgttagcgtgcaaatctttggcgaatttgcgggtggtggcattcagaaaggcgtcgattacggagacaaagatttctatgtgtttgacatcctgtctgatagcgggaacgagaaagtttactgggatgactatgtcgtcgaatcgtttgcgaccacgctcggtctgaaattagcgcctctgctgggacgtggtagtttcgctgaactgtcccagtacccaaacgatttcaaaagcattgtgaaccgttataatgaattggttgatacgacgggcctggaacatgccaataaacacgtctttggtccgcaagcgtcttctgaaactggcgtagcagaaggctacgttcttaaacccgtcaatccgaagttctttaataatggtacacgcgtggcgattaaatgcaagaactccaaattttcggagaaagccaagagcgacaaaccaattaaagcgaaagtggaactgacggagaacgataaacgtgtgctcgaaatctttagcgagtatgttacctggaatcgcgtcagtaacgtactgtcacatattggctcagtgaccgcaaaagattttgggcgtgttatgggtctgacgatgaaagacatcattaatgaagcagcacgcgaaggccatgatatggctttcgctgataacccgtcggcggtgaagaaagagctgaccattctcatccagaacacgattcgttccaaatggcacgaagttctggag

SEQ ID NO: 358 - protein, 346 aa, synthetic construct
  REGION 1..346: note = Engineered RNA ligase variants
MHHHHHHGGSGMFAYYSSLENHYNNKFIEKIRGAGFDMHTVEWVAREKIHGTNFSVIITPTEIVPAKRTGPILEGESFFGHEIIMGKYKDSFVKVQNMLNAMDLVSVQIFGEFAGGGIQKGVDYGDKDFYVFDILSDSGNEKVYWDDYVVESFATTLGLKLAPLLGRGSFAELSQYPNDFKSIVNRYNELVDTTGLEHANKHVFGPQASSETGVAEGYVLKPVNPKFFNNGTRVAIKCKNSKFSEKAKSDKPIKAKVELTENDKRVLEIFSEYVTWNRVSNVLSHIGSVTAKDFGRVMGLTMKDIINEAAREGHDMAFADNPSAVKKELTILIQNTIRSKWHEVLE

SEQ ID NO: 359 - DNA, 1038 bp, synthetic construct
  misc_feature 1..1038: note = Engineered RNA ligase variants
  source 1..1038: mol_type = other DNA
atgcatcaccatcaccatcacggtggcagcggtatgtttgcgaaatattcaagtctggaaaaccattacaataataagttcattgagaagatccgtggtgcaggcttcgatatgcacaccgtggaatgggtagctcgcgagaagattcatggaacgaactttagcgttatcattactccgaccgaaatcgtcccagccaaacgcacagggccgatcttggaaggcgagtcgttctttggtcacgaaattatcatgaagaaatataaagactccttcgtgaaggtgcagaacatgctgaatgccatggatcttgttagcgtgcaaatctttggcgaatttgcgggtggtggcattcagaaaggcgtcgattacggagacaaagatttctatgtgtttgacatcctgtctgatagcgggaacgagaaagtttactgggatgactatgtagtcgaatcgtttgcaaccggcctcggtctgaaattagcgcctctgctgggacgtggtagtttcgctgaactgtcccagtacccaaacgatttcaaaagcattgtgaactattataatgaattggttgatacgacggacctggaacatgccaataaacacgtctttggtccgcaagcgtcttctgaaactggcgtagcagaaggctacgttcttaaacccgtcaacccgaaattctttaataatggtacacgcgtggcgattaaatgcaagaactccaaattttcggagaaagccaagagcgacaaaccaattaaagcgaaacttgaactgacggagaacgataaacgtgtgctcgaaatctttagcgagtatgttacctggaatcgcgtcagtaacgtactgtcacatattggctcagtgaccgcaaaagattttgggcgtgttatgggtctgacgatgaaagacatcattaatgaagcagcacgcgaaggccatgatatgttgttcgctgataacccgtcggcggtgaagaaagagctgaccattctcatccagaacacgattcgttccaaatggcacgaagttctggag

SEQ ID NO: 360 - protein, 346 aa, synthetic construct
  REGION 1..346: note = Engineered RNA ligase variants
MHHHHHHGGSGMFAKYSSLENHYNNKFIEKIRGAGFDMHTVEWVAREKIHGTNFSVIITPTEIVPAKRTGPILEGESFFGHEIIMKKYKDSFVKVQNMLNAMDLVSVQIFGEFAGGGIQKGVDYGDKDFYVFDILSDSGNEKVYWDDYVVESFATGLGLKLAPLLGRGSFAELSQYPNDFKSIVNYYNELVDTTDLEHANKHVFGPQASSETGVAEGYVLKPVNPKFFNNGTRVAIKCKNSKFSEKAKSDKPIKAKLELTENDKRVLEIFSEYVTWNRVSNVLSHIGSVTAKDFGRVMGLTMKDIINEAAREGHDMLFADNPSAVKKELTILIQNTIRSKWHEVLE

SEQ ID NO: 361 - DNA, 1038 bp, synthetic construct
  misc_feature 1..1038: note = Engineered RNA ligase variants
  source 1..1038: mol_type = other DNA
atgcatcaccatcaccatcacggtggcagcggtatgtttgcgtattattcaagtctggaaaaccattacaataataagttcattgagaagatccgtggtgcaggcttcgatatgcacaccgtggaatgggtagctcgcgagaagattcatggaacgaactttagcgttatcattactccgaccgaaatcgtcccagccaaacgcacagggccgatcttggaaggcgagtcgttctttggtcacgaaattatcatgaagaaatataaagactccttcgtgaaggtgcagaacatgctgaatgccatggatcttgttagcgtgcaaatctttggcgaatttgcgggtggtggcattcagaaaggcgtcgattacggagacaaagatttctatgtgtttgacatcctgtctgatagcgggaacgagaaagtttactgggatgactatgtcgtcgaatcgttttgcaccacgctcggtctgaaattagcgcctctgctgggacgtggtagtttcgctgaactgtcccagtacccaaacgatttcaaaagcattgtgaacgactataatgaattggttgatacgacggacctggaacatgccaataaacacgtctttggtccgcaagcgtcttctgaaactggcgtagcagaaggctacgttcttaaacccgtcaacccgaaattctttaataatggtacacgcgtggcgattaaatgcaagaactccaaattttcggagaaagccaagagcgacaaaccaattaaagcgaaagtggaactgacggagaacgataaacgtgtgctcgaaatctttagcgagtatgttacctggaatcgcgtcagtaacgtactgtcacatattggctcagtgaccgcaaaagattttgggcgtgttatgggtctgacgatgaaagacatcattaatgaagcagcacgcgaaggccatgatatgctgttcgctgataacccgtcggcggtgaagaaagagctgaccattctcatccagaacacgattcgttccaaatggcacgaagttctggag

SEQ ID NO: 362 - protein, 346 aa, synthetic construct
  REGION 1..346: note = Engineered RNA ligase variants
MHHHHHHGGSGMFAYYSSLENHYNNKFIEKIRGAGFDMHTVEWVAREKIHGTNFSVIITPTEIVPAKRTGPILEGESFFGHEIIMKKYKDSFVKVQNMLNAMDLVSVQIFGEFAGGGIQKGVDYGDKDFYVFDILSDSGNEKVYWDDYVVESFCTTLGLKLAPLLGRGSFAELSQYPNDFKSIVNDYNELVDTTDLEHANKHVFGPQASSETGVAEGYVLKPVNPKFFNNGTRVAIKCKNSKFSEKAKSDKPIKAKVELTENDKRVLEIFSEYVTWNRVSNVLSHIGSVTAKDFGRVMGLTMKDIINEAAREGHDMLFADNPSAVKKELTILIQNTIRSKWHEVLE

SEQ ID NO: 363 - DNA, 1038 bp, synthetic construct
  misc_feature 1..1038: note = Engineered RNA ligase variants
  source 1..1038: mol_type = other DNA
atgcatcaccatcaccatcacggtggcagcggtatgtttgcgaaatattcaagtctggaaaaccattacaataataagttcattgagaagatccgtctggcaggcttcgatatgcacaccgtggaatgggtagctcgcgagaagattcatggaacgaactttagcgttatcattactccgaccgaaatcgtcccagccaaacgcacagggccgatcttggaaggcgagtcgttctttggtcacgaaattatcatgaagaaatataaagactccttcgtgaaggtgcagaacatgctgaatgccatggatcttgttagcgtgcaaatctttggcgaatttgcgggtggtggcattcagaaaggcgtcgattacggagacaaagatttctatgtgtttgacatcctgtctgatagcgggaacgagaaagtttactgggatgactatgtagtcgaatcgtttgcgaccgggctcggtctgaaattagcgcctctgctgggacgtggtagtttcgctgaactgtcccagtacccaaacgatttcaaaagcattgtgaaccgttataatgaattggttgatacgacggacctggaacatgccaataaacacgtctttggtccgcaagcgtcttctgaaactggcgtagcagaaggctacgttcttaaacccgtctatccgaagttctttaataatggtacacgcgtggcgattaaatgcaagaactccaaattttcggagaaagccaagagcgacaaaccaattaaagcgaaagtggaactgacggagaacgataaacgtgtgctcgaaatctttagcgagtatgttacctggaatcgcgtcagtaacgtactgtcacatattggctcagtgaccgcaaaagattttgggcgtgttatgggtctgacgatgaaagacatcattaatgaagcagcacgcgaaggccatgatatgctgttcgctgataacccgtcggcggtgaagaaagagctgaccattctcatccagaacacgattcgttccaaatggcacgaagttctggag

SEQ ID NO: 364 - protein, 346 aa, synthetic construct
  REGION 1..346: note = Engineered RNA ligase variants
MHHHHHHGGSGMFAKYSSLENHYNNKFIEKIRLAGFDMHTVEWVAREKIHGTNFSVIITPTEIVPAKRTGPILEGESFFGHEIIMKKYKDSFVKVQNMLNAMDLVSVQIFGEFAGGGIQKGVDYGDKDFYVFDILSDSGNEKVYWDDYVVESFATGLGLKLAPLLGRGSFAELSQYPNDFKSIVNRYNELVDTTDLEHANKHVFGPQASSETGVAEGYVLKPVYPKFFNNGTRVAIKCKNSKFSEKAKSDKPIKAKVELTENDKRVLEIFSEYVTWNRVSNVLSHIGSVTAKDFGRVMGLTMKDIINEAAREGHDMLFADNPSAVKKELTILIQNTIRSKWHEVLE

SEQ ID NO: 365 - DNA, 1038 bp, synthetic construct
  misc_feature 1..1038: note = Engineered RNA ligase variants
  source 1..1038: mol_type = other DNA
atgcatcaccatcaccatcacggtggcagcggtatgtttgcgaaatattcaagtctggaaaaccattacaataataagttcattgagaagatccgtggtgcaggcttcgatatgcacaccgtggaatgggtagctcgcgagaagattcatggaacgaactttagcgttatcattactccgaccgaaatcgtcccagccaaacgcacagggccgatcttggaaggcgagtcgttctttggtcacgaaattatcatgaagaaatataaagactccttcgtgaaggtgcagaacatgctgaatgccatggatcttgttagcgtgcaaatctttggcgaatttgcgggtggtggcattcagaaaggcgtcgattacggagacaaagatttctatgtgtttgacatcctgtctgatagcgggaacgagaaagtttactgggatgactatgtagtcgaatcgtttgcaaccggcctcggtctgaaattagcgcctctgctgggacgtggtagtttcgctgaactgtcccagtacccaaacgatttcaaaagcattgtgaactattataatgaattggttgatacgacggacctggaacatgccaataaacacgtctttggtccgcaagcgtcttctgaaactggcgtagcagaaggctacgttcttaaacccgtcaacccgaaattctttaataatggtacacgcgtggcgattaaatgcaagaactccaaattttcggagaaagccaagagcgacaaaccaattaaagcgaaagtggaactgacggagaacgataaacgtgtgctcgaaatctttagcgagtatgttacctggaatcgcgtcagtaacgtactgtcacatattggctcagtgaccgcaaaagattttgggcgtgttatgggtctgacgatgaaagacatcattaatgaagcagcacgcgaaggccatgatatgttgttcgctgataacccgtcggcggtgaagaaagagctgaccattctcatccagcatacgattcgttccaaatggcacgaagttctggag

SEQ ID NO: 366 - protein, 346 aa, synthetic construct
  REGION 1..346: note = Engineered RNA ligase variants
MHHHHHHGGSGMFAKYSSLENHYNNKFIEKIRGAGFDMHTVEWVAREKIHGTNFSVIITPTEIVPAKRTGPILEGESFFGHEIIMKKYKDSFVKVQNMLNAMDLVSVQIFGEFAGGGIQKGVDYGDKDFYVFDILSDSGNEKVYWDDYVVESFATGLGLKLAPLLGRGSFAELSQYPNDFKSIVNYYNELVDTTDLEHANKHVFGPQASSETGVAEGYVLKPVNPKFFNNGTRVAIKCKNSKFSEKAKSDKPIKAKVELTENDKRVLEIFSEYVTWNRVSNVLSHIGSVTAKDFGRVMGLTMKDIINEAAREGHDMLFADNPSAVKKELTILIQHTIRSKWHEVLE

SEQ ID NO: 367 - DNA, 1038 bp, synthetic construct
  misc_feature 1..1038: note = Engineered RNA ligase variants
  source 1..1038: mol_type = other DNA
atgcatcaccatcaccatcacggtggcagcggtatgtttgcgtattattcaagtctggaaaaccattacaataataagttcattgagaagatccgtggtgcaggcttcgatatgcacaccgtggaatgggtagctcgcgagaagattcatggaacgaactttagcgttatcattactccgaccgaaatcgtcccagccaaacgcacagggccgatcttggaaggcgagtcgttctttggtcacgaaattatcatgggcaaatataaagactccttcgtgaaggtgcagaacatgctgaatgccatggatcttgttagcgtgcaaatctttggcgaatttgcgggtggtggcattcagaaaggcgtcgattacggagacaaagatttctatgtgtttgacatcctgtctgatagcgggaacgagaaagtttactgggatgactatgtcgtcgaatcgtttgcgaccacgctcggtctgaaattagcgcctctgctgggacgtggtagtttcgctgaactgtcccagtacccaaacgatttcaaaagcattgtgaaccgttataatgaattggttgatacgacgggcctggaacatgccaataaacacgtctttggtccgcaagcgtcttctgaaactggcgtagcagaaggctacgttcttaaacccgtctatccgaagttctttaataatggtacacgcgtggcgattaaatgcaagaactccaaattttcggagaaagccaagagcgacaaaccaattaaagcgaaagtggaactgacggagaacgataaacgtgtgctcgaaatctttagcgagtatgttacctggaatcgcgtcagtaacgtactgtcacatattggctcagtgaccgcaaaagattttgggcgtgttatgggtctgacgatgaaagacatcattaatgaagcagcacgcgaaggccatgatatgctgttcgctgataacccgtcggcggtgaagaaagagctgacctggctcatccagaacacgattcgttccaaatggcacgaagttctggag

SEQ ID NO: 368 - protein, 346 aa, synthetic construct
  REGION 1..346: note = Engineered RNA ligase variants
MHHHHHHGGSGMFAYYSSLENHYNNKFIEKIRGAGFDMHTVEWVAREKIHGTNFSVIITPTEIVPAKRTGPILEGESFFGHEIIMGKYKDSFVKVQNMLNAMDLVSVQIFGEFAGGGIQKGVDYGDKDFYVFDILSDSGNEKVYWDDYVVESFATTLGLKLAPLLGRGSFAELSQYPNDFKSIVNRYNELVDTTGLEHANKHVFGPQASSETGVAEGYVLKPVYPKFFNNGTRVAIKCKNSKFSEKAKSDKPIKAKVELTENDKRVLEIFSEYVTWNRVSNVLSHIGSVTAKDFGRVMGLTMKDIINEAAREGHDMLFADNPSAVKKELTWLIQNTIRSKWHEVLE

SEQ ID NO: 369 - DNA, 1038 bp, synthetic construct
  misc_feature 1..1038: note = Engineered RNA ligase variants
  source 1..1038: mol_type = other DNA
atgcatcaccatcaccatcacggtggcagcggtatgtttgcgaaatattcaagtctggaaaaccattacaataataagttcattgagaagatccgtggtgcaggcttcgatatgcacaccgtggaatgggtagctcgcgagaagattcatggaacgaactttagcgttatcattactccgaccgaaatcgtcccagccaaacgcacagggccgatcttggaaggcgagtcgttctttggtcacgaaattatcatgaaaaaatataaagactccttcgtgaaggtgcagaacatgctgaatgccatggatcttgttagcgtgcaaatctttggcgaatttgcgggtggtggcattcagaaaggcgtcgattacggagacaaagatttctatgtgtttgacatcctgtctgatagcgggaacgagaaagtttactgggatgactatgtcgtcgaatcgttttgcaccacgctcggtctgaaattagcgcctctgctgggacgtggtagtttcgctgaactgtcccagtacccaaacgatttcaaaagcattgtgaactactataatgaattggttgatacgacggacctggaacatgccaataaacacgtctttggtccgcaagcgtcttctgaaactggcgtagcagaaggctacgttcttaaacccgtcaacccgaaattctttaataatggtacacgcgtggcgattaaatgcaagaactccaaattttcggagaaagccaagagcgacaaaccaattaaagcgaaagtggaactgacggagaacgataaacgtgtgctcgaaatctttagcgagtatgttacctggaatcgcgtcagtaacgtactgtcacatattggctcagtgaccgcaaaagattttgggcgtgttatgggtctgacgatgaaagacatcattaatgaagcagcacgcgaaggccatgatatggctttcgctgataacccgtcggcggtgaagaaagagctgaccattctcatccagaacacgattcgttccaaatggcacgaagttctggag

SEQ ID NO: 370 - protein, 346 aa, synthetic construct
  REGION 1..346: note = Engineered RNA ligase variants
MHHHHHHGGSGMFAKYSSLENHYNNKFIEKIRGAGFDMHTVEWVAREKIHGTNFSVIITPTEIVPAKRTGPILEGESFFGHEIIMKKYKDSFVKVQNMLNAMDLVSVQIFGEFAGGGIQKGVDYGDKDFYVFDILSDSGNEKVYWDDYVVESFCTTLGLKLAPLLGRGSFAELSQYPNDFKSIVNYYNELVDTTDLEHANKHVFGPQASSETGVAEGYVLKPVNPKFFNNGTRVAIKCKNSKFSEKAKSDKPIKAKVELTENDKRVLEIFSEYVTWNRVSNVLSHIGSVTAKDFGRVMGLTMKDIINEAAREGHDMAFADNPSAVKKELTILIQNTIRSKWHEVLE

SEQ ID NO: 371 - DNA, 1038 bp, synthetic construct
  misc_feature 1..1038: note = Engineered RNA ligase variants
  source 1..1038: mol_type = other DNA
atgcatcaccatcaccatcacggtggcagcggtatgtttgcgaaatattcaagtctggaaaaccattacaataataagttcattgagaagatccgtggtgcaggcttcgatatgcagaccgtggaatgggtagctcgcgagaagattcatggaacgaactttagcgttatcattactccgaccgaaatcgtcccagccaaacgcacagggccgatcttggaaggcgagtcgttctttggtcacgaaattatcatgaagaaatataaagactccttcgtgaaggtgcagaacatgctgaatgccatggatcttgttagcgtgcaaatctttggcgaatttgcgggtggtggcattcagaaaggcgtcgattacggagacaaagatttctatgtgtttgacatcctgtctgatagcgggaacgagaaagtttactgggatgactatgtagtcgaatcgtttgcaaccggcctcggtctgaaattagcgcctctgctgggacgtggtagtttcgctgaactgtcccagtacccaaacgatttcaaaagcattgtgaactattataatgaattggttgatacgacggacctggaacatgccaataaacacgtctttggtccgcaagcgtcttctgaaactggcgtagcagaaggctacgttcttaaacccgtcaacccgaaattctttaataatggtacacgcgtggcgattaaatgcaagaactccaaattttcggagaaagccaagagcgacaaaccaattaaagcgaaagtggaactgacggagaacgataaacgtgtgctcgaaatctttagcgagtatgttacctggaatcgcgtcagtaacgtactgtcacatattggctcagtgaccgcaaaagattttgggcgtgttatgggtctgacgatgaaagacatcattaatgaagcagcacgcgaaggccatgatatgttgttcgctgataacccgtcggcggtgaagaaagagctgaccattctcatccagaacacgattcgttccaaatggcacgaagttctggag

SEQ ID NO: 372 - protein, 346 aa, synthetic construct
  REGION 1..346: note = Engineered RNA ligase variants
MHHHHHHGGSGMFAKYSSLENHYNNKFIEKIRGAGFDMQTVEWVAREKIHGTNFSVIITPTEIVPAKRTGPILEGESFFGHEIIMKKYKDSFVKVQNMLNAMDLVSVQIFGEFAGGGIQKGVDYGDKDFYVFDILSDSGNEKVYWDDYVVESFATGLGLKLAPLLGRGSFAELSQYPNDFKSIVNYYNELVDTTDLEHANKHVFGPQASSETGVAEGYVLKPVNPKFFNNGTRVAIKCKNSKFSEKAKSDKPIKAKVELTENDKRVLEIFSEYVTWNRVSNVLSHIGSVTAKDFGRVMGLTMKDIINEAAREGHDMLFADNPSAVKKELTILIQNTIRSKWHEVLE

SEQ ID NO: 373 - DNA, 1038 bp, synthetic construct
  misc_feature 1..1038: note = Engineered RNA ligase variants
  source 1..1038: mol_type = other DNA
atggggcaccatcaccatcacggtggcagcggtatgtttgcgaaatattcaagtctggaaaaccattacaataataagttcattgagaagatccgtggtgcaggcttcgatatgcacaccgtggaatgggtagctcgcgagaagattcatggaacgaactttagcgttatcattactccgaccgaaatcgtcccagccaaacgcacagggccgatcttggaaggcgagtcgttctttggtcacgaaattatcatgaagaaatataaagactccttcgtgaaggtgcagaacatgctgaatgccatggatcttgttagcgtgcaaatctttggcgaatttgcgggtggtggcattcagaaaggcgtcgattacggagacaaagatttctatgtgtttgacatcctgtctgatagcgggaacgagaaagtttactgggatgactatgtagtcgaatcgtttgcaaccggcctcggtctgaaattagcgcctctgctgggacgtggtagtttcgctgaactgtcccagtacccaaacgatttcaaaagcattgtgaactattataatgaattggttgatacgacggacctggaacatgccaataaacacgtctttggtccgcaagcgtcttctgaaactggcgtagcagaaggctacgttcttaaacccgtcaacccgaaattctttaataatggtacacgcgtggcgattaaatgcaagaactccaaattttcggagaaagccaagagcgacaaaccaattaaagcgaaagtggaactgacggagaacgataaacgtgtgctcgaaatctttagcgagtatgttacctggaatcgcgtcagtaacgtactgtcacatattggctcagtgaccgcaaaagattttgggcgtgttatgggtctgacgatgaaagacatcattaatgaagcagcacgcgaaggccatgatatgttgttcgctgataacccgtcggcggtgaagaaagagctgaccattctcatccagaacacgattcgttccaaatggcacgaagttctggag

SEQ ID NO: 374 - protein, 346 aa, synthetic construct
  REGION 1..346: note = Engineered RNA ligase variants
MGHHHHHGGSGMFAKYSSLENHYNNKFIEKIRGAGFDMHTVEWVAREKIHGTNFSVIITPTEIVPAKRTGPILEGESFFGHEIIMKKYKDSFVKVQNMLNAMDLVSVQIFGEFAGGGIQKGVDYGDKDFYVFDILSDSGNEKVYWDDYVVESFATGLGLKLAPLLGRGSFAELSQYPNDFKSIVNYYNELVDTTDLEHANKHVFGPQASSETGVAEGYVLKPVNPKFFNNGTRVAIKCKNSKFSEKAKSDKPIKAKVELTENDKRVLEIFSEYVTWNRVSNVLSHIGSVTAKDFGRVMGLTMKDIINEAAREGHDMLFADNPSAVKKELTILIQNTIRSKWHEVLE

SEQ ID NO: 375 - DNA, 1038 bp, synthetic construct
  misc_feature 1..1038: note = Engineered RNA ligase variants
  source 1..1038: mol_type = other DNA
atgcatcaccatcaccatcacggtggcagcggtatgtttgcgatgtattcaagtctggaaaaccattacaataataagttcattgagaagatccgtggggcaggcttcgatatgcacaccgtggaatgggtagctcgcgagaagattcatggaacgaactttagcgttatcattactccgaccgaaatcgtcccagccaaacgcacagggccgatcttggaaggcgagtcgttctttggtcacgaaattatcatgaaaaaatataaagactccttcgtgaaggtgcagaacatgctgaatgccatggatcttgttagcgtgcaaatctttggcgaatttgcgggtggtggcattcagaaaggcgtcgattacggagacaaagatttctatgtgtttgacatcctgtctgatagcgggaacgagaaagtttactgggatgactatgtagtcgaatcgtttgcaaccgggctcggtctgaaattagcgcctctgctgggacgtggtagtttcgctgaactgtcccagtacccaaacgatttcaaaagcattgtgaactactataatgaattggttgatacgacggacctggaacatgccaataaacacgtctttggtccgcaagcgtcttctgaaactggcgtagcagaaggctacgttcttaaacccgtctatccgatcttctttaataatggtacacgcgtggcgattaaatgcaagaactccaaattttcggagaaagccaagagcgacaaaccaattaaagcgaaagtggaactgacggagaacgataaacgtgtgctcgaaatctttagcgagtatgttacctggaatcgcgtcagtaacgtactgtcacatattggctcagtgaccgcaaaagattttgggcgtgttatgggtctgacgatgaaagacatcattaatgaagcagcacgcgaaggccatgatatgttgttcgctgataacccgtcggcggtgaagaaagagctgacccgcctcatccagaacacgattcgttccaaatggcacgaagttctggag

SEQ ID NO: 376 - protein, 346 aa, synthetic construct
  REGION 1..346: note = Engineered RNA ligase variants
MHHHHHHGGSGMFAMYSSLENHYNNKFIEKIRGAGFDMHTVEWVAREKIHGTNFSVIITPTEIVPAKRTGPILEGESFFGHEIIMKKYKDSFVKVQNMLNAMDLVSVQIFGEFAGGGIQKGVDYGDKDFYVFDILSDSGNEKVYWDDYVVESFATGLGLKLAPLLGRGSFAELSQYPNDFKSIVNYYNELVDTTDLEHANKHVFGPQASSETGVAEGYVLKPVYPIFFNNGTRVAIKCKNSKFSEKAKSDKPIKAKVELTENDKRVLEIFSEYVTWNRVSNVLSHIGSVTAKDFGRVMGLTMKDIINEAAREGHDMLFADNPSAVKKELTRLIQNTIRSKWHEVLE

SEQ ID NO: 377 - DNA, 1038 bp, synthetic construct
  misc_feature 1..1038: note = Engineered RNA ligase variants
  source 1..1038: mol_type = other DNA
atgcatcaccatcaccatcacggtggcagcggtatgtttgcgatgtattcaagtctggaaaaccattacaataataagttcattgagaagatccgtctggcaggcttcgatatgcacaccgtggaatgggtagctcgcgagaagattcatggaacgaactttagcgttatcattactccgaccgaaatcgtcccagccaaacgcacagggccgatcttggaaggcgagtcgttctttggtcacgaaattatcatgaagaaatataaagactccttcgtgaaggtgcagaacatgctgaatgccatggatcttgttagcgtgcaaatctttggcgaatttgcgggtggtggcattcagaaaggcgtcgattacggagacaaagatttctatgtgtttgacatcctgtctgatagcgggaacgagaaagtttactgggatgactatcgcgtcgaatcgtttgcgaccgggctcggtctgaaattagcgcctctgctgggacgtggtagtttcgctgaactgtcccagtacccaaacgatttcaaaagcattgtgaactactataatgaattggttgatacgacggacctggaacatgccaataaacacgtctttggtccgcaagcgtcttctgaaactggcgtagcagaaggctacgttcttaaacccgtctatccgaagttctttaataatggtacacgcgtggcgattaaatgcaagaactccaaattttcggagaaagccaagagcgacaaaccaattaaagcgaaagtggaactgacggagaacgataaacgtgtgctcgaaatctttagcgagtatgttacctggaatcgcgtcagtaacgtactgtcacatattggctcagtgaccgcaaaagattttgggcgtgttatgggtctgacgatgaaagacatcattaatgaagcagcacgcgaaggccatgatatgctgttcgctgataacccgtcggcggtgaagaaagagctgaccattctcatccagaacacgattcgttccaaatggcacgaagttctggag

SEQ ID NO: 378 - protein, 346 aa, synthetic construct
  REGION 1..346: note = Engineered RNA ligase variants
MHHHHHHGGSGMFAMYSSLENHYNNKFIEKIRLAGFDMHTVEWVAREKIHGTNFSVIITPTEIVPAKRTGPILEGESFFGHEIIMKKYKDSFVKVQNMLNAMDLVSVQIFGEFAGGGIQKGVDYGDKDFYVFDILSDSGNEKVYWDDYRVESFATGLGLKLAPLLGRGSFAELSQYPNDFKSIVNYYNELVDTTDLEHANKHVFGPQASSETGVAEGYVLKPVYPKFFNNGTRVAIKCKNSKFSEKAKSDKPIKAKVELTENDKRVLEIFSEYVTWNRVSNVLSHIGSVTAKDFGRVMGLTMKDIINEAAREGHDMLFADNPSAVKKELTILIQNTIRSKWHEVLE

SEQ ID NO: 379 - DNA, 1038 bp, synthetic construct
  misc_feature 1..1038: note = Engineered RNA ligase variants
  source 1..1038: mol_type = other DNA
atgcatcaccatcaccatcacggtggcagcggtatgtttgcgaaatattcaagtctggaaaaccattacaataataagttcattgagaagatccgtggtgcaggcttcgatatgcacaccgtggaatgggtagctcgcgagaagattcatggaacgaactttagcgttatcattactccgaccgaaatcgtcccagccaaacgcacagggccgatcttggaaggcgagtcgttctttggtcacgaaattatcatgaagaaatatattgactccttcgtgaaggtgcagaacatgctgaatgccatggatcttgttagcgtgcaaatctttggcgaatttgcgggtggtggcattcagaaaggcgtcgattacggagacaaagatttctatgtgtttgacatcctgtctgatagcgggaacgagaaagtttactgggatgactatgtagtcgaatcgtttgcaaccggcctcggtctgaaattagcgcctctgctgggacgtggtagtttcgctgaactgtcccagtacccaaacgatttcaaaagcattgtgaactattataatgaattggttgatacgacggacctggaacatgccaataaacacgtctttggtccgcaagcgtcttctgaaactggcgtagcagaaggctacgttcttaaacccgtcaacccgaaattctttaataatggtacacgcgtggcgattaaatgcaagaactccaaattttcggagaaagccaagagcgacaaaccaattaaagcgaaagtggaactgacggagaacgataaacgtgtgctcgaaatctttagcgagtatgttacctggaatcgcgtcagtaacgtactgtcacatattggctcagtgaccgcaaaagattttgggcgtgttatgggtctgacgatgaaagacatcattcaggaagcagcacgcgaaggccatgatatgttgttcgctgataacccgtcggcggtgaagaaagagctgaccattctcatccagaacacgattcgttccaaatggcacgaagttctggag

SEQ ID NO: 380 - protein, 346 aa, synthetic construct
  REGION 1..346: note = Engineered RNA ligase variants
MHHHHHHGGSGMFAKYSSLENHYNNKFIEKIRGAGFDMHTVEWVAREKIHGTNFSVIITPTEIVPAKRTGPILEGESFFGHEIIMKKYIDSFVKVQNMLNAMDLVSVQIFGEFAGGGIQKGVDYGDKDFYVFDILSDSGNEKVYWDDYVVESFATGLGLKLAPLLGRGSFAELSQYPNDFKSIVNYYNELVDTTDLEHANKHVFGPQASSETGVAEGYVLKPVNPKFFNNGTRVAIKCKNSKFSEKAKSDKPIKAKVELTENDKRVLEIFSEYVTWNRVSNVLSHIGSVTAKDFGRVMGLTMKDIIQEAAREGHDMLFADNPSAVKKELTILIQNTIRSKWHEVLE

SEQ ID NO: 381 - DNA, 1038 bp, synthetic construct
  misc_feature 1..1038: note = Engineered RNA ligase variants
  source 1..1038: mol_type = other DNA
atgcatcaccatcaccatcacggtggcagcggtatgtttgcgatgtattcaagtctggaaaaccattacaataataagttcattgagaagatccgtggggcaggcttcgatatgcacaccgtggaatgggtagctcgcgagaagattcatggaacgaactttagcgttatcattactccgaccgaaatcgtcccagccaaacgcacagggccgatcttggaaggcgagtcgttctttggtcacgaaattatcatgaagaaatataaagactccttcgtgaaggtgcagaacatgctgaatgccatggatcttgttagcgtgcaaatctttggcgaatttgcgggtggtggcattcagaaaggcgtcgattacggagacaaagatttctatgtgtttgacatcctgtctgatagcgggaacgagaaagtttactgggatgactatgtcgtcgaatcgttttgcaccacactcggtctgaaattagcgcctctgctgggacgtggtagtttcgctgaactgtcccagtacccaaacgatttcaaaagcattgtgaactactataatgaattggttgatacgacggacctggaacatgccaataaacacgtctttggtccgcaagcgtcttctgaaactggcgtagcagaaggctacgttcttaaacccgtcaacccgaaattctttaataatggtacacgcgtggcgattaaatgcaagaactccaaattttcggagaaagccaagagcgacaaaccaattaaagcgaaagtggaactgacggagaacgataaacgtgtgctcgaaatctttagcgagtatgttacctggaatcgcgtcagtaacgtactgtcacatattggctcagtgaccgcaaaagattttgggcgtgttatgggtctgacgatgaaagacatcattaatgaagcagcacgcgaaggccatgatatggctttcgctgataacccgtcggcggtgaagaaagagctgaccattctcatccagaacacgattcgttccaaatggcacgaagttctggag

SEQ ID NO: 382 - protein, 346 aa, synthetic construct
  REGION 1..346: note = Engineered RNA ligase variants
MHHHHHHGGSGMFAMYSSLENHYNNKFIEKIRGAGFDMHTVEWVAREKIHGTNFSVIITPTEIVPAKRTGPILEGESFFGHEIIMKKYKDSFVKVQNMLNAMDLVSVQIFGEFAGGGIQKGVDYGDKDFYVFDILSDSGNEKVYWDDYVVESFCTTLGLKLAPLLGRGSFAELSQYPNDFKSIVNYYNELVDTTDLEHANKHVFGPQASSETGVAEGYVLKPVNPKFFNNGTRVAIKCKNSKFSEKAKSDKPIKAKVELTENDKRVLEIFSEYVTWNRVSNVLSHIGSVTAKDFGRVMGLTMKDIINEAAREGHDMAFADNPSAVKKELTILIQNTIRSKWHEVLE

SEQ ID NO: 383 - DNA, 1038 bp, synthetic construct
  misc_feature 1..1038: note = Engineered RNA ligase variants
  source 1..1038: mol_type = other DNA
atgcatcaccatcaccatcacggtggcagcggtatgtttgcggaatattcaagtctggaaaaccattacaataataagttcattgagaagatccgtggggcaggcttcgatatgcacaccgtggaatgggtagctcgcgagaagattcatggaacgaactttagcgttatcattactccgaccgaaatcgtcccagccaaacgcacagggccgatcttggaaggcgagtcgttctttggtcacgaaattatcatgaagaaatataaagactccttcgtgaaggtgcagaacatgctgaatgccatggatcttgttagcgtgcaaatctttggcgaatttgcgggtggtggcattcagaaaggcgtcgattacggagacaaagatttctatgtgtttgacatcctgtctgatagcgggaacgagaaagtttactgggatgactatgtcgtcgaatcgtttgcgaccgggctcggtctgaaattagcgcctctgctgggacgtggtagtttcgctgaactgtcccagtacccaaacgatttcaaaagcattgtgaaccgttataatgaattggttgatacgacggacctggaacatgccaataaacacgtctttggtccgcaagcgtcttctgaaactggcgtagcagaaggctacgttcttaaacccgtcaacccgaaattctttaataatggtacacgcgtggcgattaaatgcaagaactccaaattttcggagaaagccaagagcgacaaaccaattaaagcgaaagtggaactgacggagaacgataaacgtgtgctcgaaatctttagcgagtatgttacctggaatcgcgtcagtaacgtactgtcacatattggctcagtgaccgcaaaagattttgggcgtgttatgggtctgacgatgaaagacatcattaatgaagcagcacgcgaaggccatgatatgctgttcgctgataacccgtcggcggtgaagaaagagctgacctggctcatccagaacacgattcgttccaaatggcacgaagttctggag

SEQ ID NO: 384 - protein, 346 aa, synthetic construct
  REGION 1..346: note = Engineered RNA ligase variants
MHHHHHHGGSGMFAEYSSLENHYNNKFIEKIRGAGFDMHTVEWVAREKIHGTNFSVIITPTEIVPAKRTGPILEGESFFGHEIIMKKYKDSFVKVQNMLNAMDLVSVQIFGEFAGGGIQKGVDYGDKDFYVFDILSDSGNEKVYWDDYVVESFATGLGLKLAPLLGRGSFAELSQYPNDFKSIVNRYNELVDTTDLEHANKHVFGPQASSETGVAEGYVLKPVNPKFFNNGTRVAIKCKNSKFSEKAKSDKPIKAKVELTENDKRVLEIFSEYVTWNRVSNVLSHIGSVTAKDFGRVMGLTMKDIINEAAREGHDMLFADNPSAVKKELTWLIQNTIRSKWHEVLE

SEQ ID NO: 385 - DNA, 1038 bp, synthetic construct
  misc_feature 1..1038: note = Engineered RNA ligase variants
  source 1..1038: mol_type = other DNA
atgcatcaccatcaccatcacggtggcagcggtatgtttgcgccgtattcaagtctggaaaaccattacaataataagttcattgagaagatccgtctggcaggcttcgatatgcacaccgtggaatgggtagctcgcgagaagattcatggaacgaactttagcgttatcattactccgaccgaaatcgtcccagccaaacgcacagggccgatcttggaaggcgagtcgttctttggtcacgaaattatcatgaagaaatataaagactccttcgtgaaggtgcagaacatgctgaatgccatggatcttgttagcgtgcaaatctttggcgaatttgcgggtggtggcattcagaaaggcgtcgattacggagacaaagatttctatgtgtttgacatcctgtctgatagcgggaacgagaaagtttactgggatgactatgtcgtcgaatcgttttgcaccgggctcggtctgaaattagcgcctctgctgggacgtggtagtttcgctgaactgtcccagtacccaaacgatttcaaaagcattgtgaactattataatgaattggttgatacgacggacctggaacatgccaataaacacgtctttggtccgcaagcgtcttctgaaactggcgtagcagaaggctacgttcttaaacccgtcaatccgaagttctttaataatggtacacgcgtggcgattaaatgcaagaactccaaattttcggagaaagccaagagcgacaaaccaattaaagcgaaagtggaactgacggagaacgataaacgtgtgctcgaaatctttagcgagtatgttacctggaatcgcgtcagtaacgtactgtcacatattggctcagtgaccgcaaaagattttgggcgtgttatgggtctgacgatgaaagacatcattaatgaagcagcacgcgaaggccatgatatggctttcgctgataacccgtcggcggtgaagaaagagctgaccattctcatccagaacacgattcgttccaaatggcacgaagttctggag

SEQ ID NO: 386 - protein, 346 aa, synthetic construct
  REGION 1..346: note = Engineered RNA ligase variants
MHHHHHHGGSGMFAPYSSLENHYNNKFIEKIRLAGFDMHTVEWVAREKIHGTNFSVIITPTEIVPAKRTGPILEGESFFGHEIIMKKYKDSFVKVQNMLNAMDLVSVQIFGEFAGGGIQKGVDYGDKDFYVFDILSDSGNEKVYWDDYVVESFCTGLGLKLAPLLGRGSFAELSQYPNDFKSIVNYYNELVDTTDLEHANKHVFGPQASSETGVAEGYVLKPVNPKFFNNGTRVAIKCKNSKFSEKAKSDKPIKAKVELTENDKRVLEIFSEYVTWNRVSNVLSHIGSVTAKDFGRVMGLTMKDIINEAAREGHDMAFADNPSAVKKELTILIQNTIRSKWHEVLE

SEQ ID NO: 387 - DNA, 1038 bp, synthetic construct
  misc_feature 1..1038: note = Engineered RNA ligase variants
  source 1..1038: mol_type = other DNA
atgcatcaccatcaccatcacggtggcagcggtatgtttgcgaaatattcaagtctggaaaaccattacaataataagttcattgagaagatccgtggtgcaggcttcgatatgcacaccgtggaatgggtagctcgcgagaagattcatggaacgaactttagcgttatcattactccgaccgaaatcgtcccagccaaacgcacagggccgatcttggaaggcgagtcgttctttggtcacgaaattatcatgaagaaatatcatgactccttcgtgaaggtgcagaacatgctgaatgccatggatcttgttagcgtgcaaatctttggcgaatttgcgggtggtggcattcagaaaggcgtcgattacggagacaaagatttctatgtgtttgacatcctgtctgatagcgggaacgagaaagtttactgggatgactatgtagtcgaatcgtttgcaaccggcctcggtctgaaattagcgcctctgctgggacgtggtagtttcgctgaactgtcccagtacccaaacgatttcaaaagcattgtgaactattataatgaattggttgatacgacggacctggaacatgccaataaacacgtctttggtccgcaagcgtcttctgaaactggcgtagcagaaggctacgttcttaaacccgtcaacccgaaattctttaataatggtacacgcgtggcgattaaatgcaagaactccaaattttcggagaaagccaagagcgacaaaccaattaaagcgaaagtggaactgacggagaacgataaacgtgtgctcgaaatctttagcgagtatgttacctggaatcgcgtcagtaacgtactgtcacatattggctcagtgaccgcaaaagattttgggcgtgttatgggtctgacgatgaaagacatcattaatgaagcagcacgcgaaggccatgatatgttgttcgctgataacccgtcggcggtgaagaaagagctgaccattctcatccagaacacgattcgttccaaatggcacgaagttctggag

SEQ ID NO: 388 - protein, 346 aa, synthetic construct
  REGION 1..346: note = Engineered RNA ligase variants
MHHHHHHGGSGMFAKYSSLENHYNNKFIEKIRGAGFDMHTVEWVAREKIHGTNFSVIITPTEIVPAKRTGPILEGESFFGHEIIMKKYHDSFVKVQNMLNAMDLVSVQIFGEFAGGGIQKGVDYGDKDFYVFDILSDSGNEKVYWDDYVVESFATGLGLKLAPLLGRGSFAELSQYPNDFKSIVNYYNELVDTTDLEHANKHVFGPQASSETGVAEGYVLKPVNPKFFNNGTRVAIKCKNSKFSEKAKSDKPIKAKVELTENDKRVLEIFSEYVTWNRVSNVLSHIGSVTAKDFGRVMGLTMKDIINEAAREGHDMLFADNPSAVKKELTILIQNTIRSKWHEVLE

SEQ ID NO: 389 - DNA, 1038 bp, synthetic construct
  misc_feature 1..1038: note = Engineered RNA ligase variants
  source 1..1038: mol_type = other DNA
atgcatcaccatcaccatcacggtggcagcggtatgtttgcgtattattcaagtctggaaaaccattacaataataagttcattgagaagatccgtctggcaggcttcgatatgcacaccgtggaatgggtagctcgcgagaagattcatggaacgaactttagcgttatcattactccgaccgaaatcgtcccagccaaacgcacagggccgatcttggaaggcgagtcgttctttggtcacgaaattatcatgaaaaaatataaagactccttcgtgaaggtgcagaacatgctgaatgccatggatcttgttagcgtgcaaatctttggcgaatttgcgggtggtggcattcagaaaggcgtcgattacggagacaaagatttctatgtgtttgacatcctgtctgatagcgggaacgagaaagtttactgggatgactatgtcgtcgaatcgtttgcgaccgggctcggtctgaaattagcgcctctgctgggacgtggtagtttcgctgaactgtcccagtacccaaacgatttcaaaagcattgtgaactactataatgaattggttgatacgacgggcctggaacatgccaataaacacgtctttggtccgcaagcgtcttctgaaactggcgtagcagaaggctacgttcttaaacccgtctatccgaagttctttaataatggtacacgcgtggcgattaaatgcaagaactccaaattttcggagaaagccaagagcgacaaaccaattaaagcgaaagtggaactgacggagaacgataaacgtgtgctcgaaatctttagcgagtatgttacctggaatcgcgtcagtaacgtactgtcacatattggctcagtgaccgcaaaagattttgggcgtgttatgggtctgacgatgaaagacatcattaatgaagcagcacgcgaaggccatgatatggctttcgctgataacccgtcggcggtgaagaaagagctgaccattctcatccagaacacgattcgttccaaatggcacgaagttctggag

SEQ ID NO: 390 - protein, 346 aa, synthetic construct
  REGION 1..346: note = Engineered RNA ligase variants
MHHHHHHGGSGMFAYYSSLENHYNNKFIEKIRLAGFDMHTVEWVAREKIHGTNFSVIITPTEIVPAKRTGPILEGESFFGHEIIMKKYKDSFVKVQNMLNAMDLVSVQIFGEFAGGGIQKGVDYGDKDFYVFDILSDSGNEKVYWDDYVVESFATGLGLKLAPLLGRGSFAELSQYPNDFKSIVNYYNELVDTTGLEHANKHVFGPQASSETGVAEGYVLKPVYPKFFNNGTRVAIKCKNSKFSEKAKSDKPIKAKVELTENDKRVLEIFSEYVTWNRVSNVLSHIGSVTAKDFGRVMGLTMKDIINEAAREGHDMAFADNPSAVKKELTILIQNTIRSKWHEVLE

SEQ ID NO: 391 - DNA, 1038 bp, synthetic construct
  misc_feature 1..1038: note = Engineered RNA ligase variants
  source 1..1038: mol_type = other DNA
atgcatcaccatcaccatcacggtggcagcggtatgtttgcggaatattcaagtctggaaaaccattacaataataagttcattgagaagatccgtggggcaggcttcgatatgcacaccgtggaatgggtagctcgcgagaagattcatggaacgaactttagcgttatcattactccgaccgaaatcgtcccagccaaacgcacagggccgatcttggaaggcgagtcgttctttggtcacgaaattatcatgaagaaatataaagactccttcgtgaaggtgcagaacatgctgaatgccatggatcttgttagcgtgcaaatctttggcgaatttgcgggtggtggcattcagaaaggcgtcgattacggagacaaagatttctatgtgtttgacatcctgtctgatagcgggaacgagaaagtttactgggatgactatgtcgtcgaatcgtttgcgaccacgctcggtctgaaattagcgcctctgctgggacgtggtagtttcgctgaactgtcccagtacccaaacgatttcaaaagcattgtgaactactataatgaattggttgatacgacggacctggaacatgccaataaacacgtctttggtccgcaagcgtcttctgaaactggcgtagcagaaggctacgttcttaaacccgtctatccgatcttctttaataatggtacacgcgtggcgattaaatgcaagaactccaaattttcggagaaagccaagagcgacaaaccaattaaagcgaaagtggaactgacggagaacgataaacgtgtgctcgaaatctttagcgagtatgttacctggaatcgcgtcagtaacgtactgtcacatattggctcagtgaccgcaaaagattttgggcgtgttatgggtctgacgatgaaagacatcattaatgaagcagcacgcgaaggccatgatatgctgttcgctgataacccgtcggcggtgaagaaagagctgaccattctcatccagaacacgattcgttccaaatggcacgaagttctggag

SEQ ID NO: 392 - protein, 346 aa, synthetic construct
  REGION 1..346: note = Engineered RNA ligase variants
MHHHHHHGGSGMFAEYSSLENHYNNKFIEKIRGAGFDMHTVEWVAREKIHGTNFSVIITPTEIVPAKRTGPILEGESFFGHEIIMKKYKDSFVKVQNMLNAMDLVSVQIFGEFAGGGIQKGVDYGDKDFYVFDILSDSGNEKVYWDDYVVESFATTLGLKLAPLLGRGSFAELSQYPNDFKSIVNYYNELVDTTDLEHANKHVFGPQASSETGVAEGYVLKPVYPIFFNNGTRVAIKCKNSKFSEKAKSDKPIKAKVELTENDKRVLEIFSEYVTWNRVSNVLSHIGSVTAKDFGRVMGLTMKDIINEAAREGHDMLFADNPSAVKKELTILIQNTIRSKWHEVLE

SEQ ID NO: 393 - DNA, 1038 bp, synthetic construct
  misc_feature 1..1038: note = Engineered RNA ligase variants
  source 1..1038: mol_type = other DNA
atgcatcaccatcaccatcacggtggcagcggtatgtttgcgaaatattcaagtctggaaaaccattacaataataagttcattgagaagatccgtggtgcaggcttcgatatgcacaccgtggaatgggtagctcgcgagaagattcatggaacgaactttagcgttatcattactccgaccgaaatcgtcccagccaaacgcacagggccgatcttggaaggcgagtcgttctttggtcacgaaattatcatgaaaaaatataaagactccttcgtgaaggtgcagaacatgctgaatgccatggatcttgttagcgtgcaaatctttggcgaatttgcgggtggtggcattcagaaaggcgtcgattacggagacaaagatttctatgtgtttgacatcctgtctgatagcgggaacgagaaagtttactgggatgactatgtagtcgaatcgttttgcaccgggctcggtctgaaattagcgcctctgctgggacgtggtagtttcgctgaactgtcccagtacccaaacgatttcaaaagcattgtgaaccgttataatgaattggttgatacgacggacctggaacatgccaataaacacgtctttggtccgcaagcgtcttctgaaactggcgtagcagaaggctacgttcttaaacccgtcaacccgaaattctttaataatggtacacgcgtggcgattaaatgcaagaactccaaattttcggagaaagccaagagcgacaaaccaattaaagcgaaagtggaactgacggagaacgataaacgtgtgctcgaaatctttagcgagtatgttacctggaatcgcgtcagtaacgtactgtcacatattggctcagtgaccgcaaaagattttgggcgtgttatgggtctgacgatgaaagacatcattaatgaagcagcacgcgaaggccatgatatgctgttcgctgataacccgtcggcggtgaagaaagagctgaccctgctcatccagaacacgattcgttccaaatggcacgaagttctggag

SEQ ID NO: 394 - protein, 346 aa, synthetic construct
  REGION 1..346: note = Engineered RNA ligase variants
MHHHHHHGGSGMFAKYSSLENHYNNKFIEKIRGAGFDMHTVEWVAREKIHGTNFSVIITPTEIVPAKRTGPILEGESFFGHEIIMKKYKDSFVKVQNMLNAMDLVSVQIFGEFAGGGIQKGVDYGDKDFYVFDILSDSGNEKVYWDDYVVESFCTGLGLKLAPLLGRGSFAELSQYPNDFKSIVNRYNELVDTTDLEHANKHVFGPQASSETGVAEGYVLKPVNPKFFNNGTRVAIKCKNSKFSEKAKSDKPIKAKVELTENDKRVLEIFSEYVTWNRVSNVLSHIGSVTAKDFGRVMGLTMKDIINEAAREGHDMLFADNPSAVKKELTLLIQNTIRSKWHEVLE

SEQ ID NO: 395 - DNA, 1038 bp, synthetic construct
  misc_feature 1..1038: note = Engineered RNA ligase variants
  source 1..1038: mol_type = other DNA
atgcatcaccatcaccatcacggtggcagcggtatgtttgcgaaatattcaagtctggaaaaccattacaataataagttcattgagaagatccgtggtgcaggcttcgatatgcacaccgtggaatgggtagctcgcgagaagattcatggaacgaactttagcgttatcattactccgaccgaaatcgtcccagccaaacgcacagggccgatcttggaaggcgagtcgttctttggtcacgaaattatcatgaagaaatataaagactccttcgtgaaggtgcagaacatgctgaatgccatggatcttgttagcgtgcaaatctttggcgaatttgcgggtggtggcattcagaaaggcgtcgattacggagacaaagatttctatgtgtttgacatcctgtctgatagcgggaacgagaaagtttactgggatgactatgtagtcgaatcgtttgcaaccggcctcggtctgaaattagcgcctctgctgggacgtggtagtttcgctgaactgtcccagtacccaaacgatttcaaaagcattgtggggtattataatgaattggttgatacgacggacctggaacatgccaataaacacgtctttggtccgcaagcgtcttctgaaactggcgtagcagaaggctacgttcttaaacccgtcaacccgaaattctttaataatggtacacgcgtggcgattaaatgcaagaactccaaattttcggagaaagccaagagcgacaaaccaattaaagcgaaagtggaactgacggagaacgataaacgtgtgctcgaaatctttagcgagtatgttacctggaatcgcgtcagtaacgtactgtcacatattggctcagtgaccgcaaaagattttgggcgtgttatgggtctgacgatgaaagacatcattaatgaagcagcacgcgaaggccatgatatgttgttcgctgataacccgtcggcggtgaagaaagagctgaccattctcatccagaacacgattcgttccaaatggcacgaagttctggag

SEQ ID NO: 396 - protein, 346 aa, synthetic construct
  REGION 1..346: note = Engineered RNA ligase variants
MHHHHHHGGSGMFAKYSSLENHYNNKFIEKIRGAGFDMHTVEWVAREKIHGTNFSVIITPTEIVPAKRTGPILEGESFFGHEIIMKKYKDSFVKVQNMLNAMDLVSVQIFGEFAGGGIQKGVDYGDKDFYVFDILSDSGNEKVYWDDYVVESFATGLGLKLAPLLGRGSFAELSQYPNDFKSIVGYYNELVDTTDLEHANKHVFGPQASSETGVAEGYVLKPVNPKFFNNGTRVAIKCKNSKFSEKAKSDKPIKAKVELTENDKRVLEIFSEYVTWNRVSNVLSHIGSVTAKDFGRVMGLTMKDIINEAAREGHDMLFADNPSAVKKELTILIQNTIRSKWHEVLE

SEQ ID NO: 397 - DNA, 1038 bp, synthetic construct
  misc_feature 1..1038: note = Engineered RNA ligase variants
  source 1..1038: mol_type = other DNA
atgcatcaccatcaccatcacggtggcagcggtatgtttgcgatgtattcaattctggaaaaccattacaataataagttcattgagaagatccgtggtgcaggcttcgatatgcacaccgtggaatgggtagctcgcgagaagattcatggaacgaactttagcgttatcattactccgaccgaaatcgtcccagccaaacgcacagggccgatcttggaaggcgagtcgttctttggtcacgaaattatcatgaagaaatataaagactccttcgtgaaggtgcagaacatgctgaatgccatggatcttgttagcgtgcaaatctttggcgaatttgcgggtggtggcattcagaaaggcgtcgattacggagacaaagatttctatgtgtttgacatcctgtctgatagcgggaacgagaaagtttactgggatgactatcgcgtcgaatcgtttgcgaccgggctcggtctgaaattagcgcctctgctgggacgtggtagtttcgctgaactgtcccagtacccaaacgatttcaaaagcattgtgaaccgttataatgaattggttgatacgacgggcctggaacatgccaataaacacgtctttggtccgcaagcgtcttctgaaactggcgtagcagaaggctacgttcttaaacccgtcaatccgaagttctttaataatggtacacgcgtggcgattaaatgcaagaactccaaattttcggagaaagccaagagcgacaaaccaattaaagcgaaagtggaactgacggagaacgataaacgtgtgctcgaaatctttagcgagtatgttacctggaatcgcgtcagtaacgtactgtcacatattggctcagtgaccgcaaaagattttgggcgtgttatgggtctgacgatgaaagacatcattaatgaagcagcacgcgaaggccatgatatgttgttcgctgataacccgtcggcggtgaagaaagagctgaccattctcatccagaacacgattcgttccaaatggcacgaagttctggag

SEQ ID NO: 398 - protein, 346 aa, synthetic construct
  REGION 1..346: note = Engineered RNA ligase variants
MHHHHHHGGSGMFAMYSILENHYNNKFIEKIRGAGFDMHTVEWVAREKIHGTNFSVIITPTEIVPAKRTGPILEGESFFGHEIIMKKYKDSFVKVQNMLNAMDLVSVQIFGEFAGGGIQKGVDYGDKDFYVFDILSDSGNEKVYWDDYRVESFATGLGLKLAPLLGRGSFAELSQYPNDFKSIVNRYNELVDTTGLEHANKHVFGPQASSETGVAEGYVLKPVNPKFFNNGTRVAIKCKNSKFSEKAKSDKPIKAKVELTENDKRVLEIFSEYVTWNRVSNVLSHIGSVTAKDFGRVMGLTMKDIINEAAREGHDMLFADNPSAVKKELTILIQNTIRSKWHEVLE

SEQ ID NO: 399 - DNA, 1038 bp, synthetic construct
  misc_feature 1..1038: note = Engineered RNA ligase variants
  source 1..1038: mol_type = other DNA
atgcatcaccatcaccatcacggtggcagcggtatgtttgcgaaatattcaagtctggaaaaccattacaataataagttcattgagaagatccgtggtgcaggcttcgatatgcacaccgtggaatgggtagctcgcgagaagattcatggaacgaactttagcgttatcattactccgaccgaaatcgtcccagccaaacgcacagggccgatcttggaaggcgagtcgttctttggtcacgaaattatcatgggcaaatataaagactccttcgtgaaggtgcagaacatgctgaatgccatggatcttgttagcgtgcaaatctttggcgaatttgcgggtggtggcattcagaaaggcgtcgattacggagacaaagatttctatgtgtttgacatcctgtctgatagcgggaacgagaaagtttactgggatgactatcgcgtcgaatcgttttgcaccacgctcggtctgaaattagcgcctctgctgggacgtggtagtttcgctgaactgtcccagtacccaaacgatttcaaaagcattgtgaactattataatgaattggttgatacgacggacctggaacatgccaataaacacgtctttggtccgcaagcgtcttctgaaactggcgtagcagaaggctacgttcttaaacccgtcaacccgaaattctttaataatggtacacgcgtggcgattaaatgcaagaactccaaattttcggagaaagccaagagcgacaaaccaattaaagcgaaagtggaactgacggagaacgataaacgtgtgctcgaaatctttagcgagtatgttacctggaatcgcgtcagtaacgtactgtcacatattggctcagtgaccgcaaaagattttgggcgtgttatgggtctgacgatgaaagacatcattaatgaagcagcacgcgaaggccatgatatgctgttcgctgataacccgtcggcggtgaagaaagagctgaccattctcatccagaacacgattcgttccaaatggcacgaagttctggag

SEQ ID NO: 400 - protein, 346 aa, synthetic construct
  REGION 1..346: note = Engineered RNA ligase variants
MHHHHHHGGSGMFAKYSSLENHYNNKFIEKIRGAGFDMHTVEWVAREKIHGTNFSVIITPTEIVPAKRTGPILEGESFFGHEIIMGKYKDSFVKVQNMLNAMDLVSVQIFGEFAGGGIQKGVDYGDKDFYVFDILSDSGNEKVYWDDYRVESFCTTLGLKLAPLLGRGSFAELSQYPNDFKSIVNYYNELVDTTDLEHANKHVFGPQASSETGVAEGYVLKPVNPKFFNNGTRVAIKCKNSKFSEKAKSDKPIKAKVELTENDKRVLEIFSEYVTWNRVSNVLSHIGSVTAKDFGRVMGLTMKDIINEAAREGHDMLFADNPSAVKKELTILIQNTIRSKWHEVLE

SEQ ID NO: 401 - DNA, 1038 bp, synthetic construct
  misc_feature 1..1038: note = Engineered RNA ligase variants
  source 1..1038: mol_type = other DNA
atgcatcaccatcaccatcacggtggcagcggtatgtttgcgccgtattcaagtctggaaaaccattacaataataagttcattgagaagatccgtctggcaggcttcgatatgcacaccgtggaatgggtagctcgcgagaagattcatggaacgaactttagcgttatcattactccgaccgaaatcgtcccagccaaacgcacagggccgatcttggaaggcgagtcgttctttggtcacgaaattatcatgaaaaaatataaagactccttcgtgaaggtgcagaacatgctgaatgccatggatcttgttagcgtgcaaatctttggcgaatttgcgggtggtggcattcagaaaggcgtcgattacggagacaaagatttctatgtgtttgacatcctgtctgatagcgggaacgagaaagtttactgggatgactatcgcgtcgaatcgtttgcgaccgggctcggtctgaaattagcgcctctgctgggacgtggtagtttcgctgaactgtcccagtacccaaacgatttcaaaagcattgtgaactattataatgaattggttgatacgacggacctggaacatgccaataaacacgtctttggtccgcaagcgtcttctgaaactggcgtagcagaaggctacgttcttaaacccgtcaacccgaaattctttaataatggtacacgcgtggcgattaaatgcaagaactccaaattttcggagaaagccaagagcgacaaaccaattaaagcgaaagtggaactgacggagaacgataaacgtgtgctcgaaatctttagcgagtatgttacctggaatcgcgtcagtaacgtactgtcacatattggctcagtgaccgcaaaagattttgggcgtgttatgggtctgacgatgaaagacatcattaatgaagcagcacgcgaaggccatgatatgctgttcgctgataacccgtcggcggtgaagaaagagctgaccctgctcatccagaacacgattcgttccaaatggcacgaagttctggag

SEQ ID NO: 402 - protein, 346 aa, synthetic construct
  REGION 1..346: note = Engineered RNA ligase variants
MHHHHHHGGSGMFAPYSSLENHYNNKFIEKIRLAGFDMHTVEWVAREKIHGTNFSVIITPTEIVPAKRTGPILEGESFFGHEIIMKKYKDSFVKVQNMLNAMDLVSVQIFGEFAGGGIQKGVDYGDKDFYVFDILSDSGNEKVYWDDYRVESFATGLGLKLAPLLGRGSFAELSQYPNDFKSIVNYYNELVDTTDLEHANKHVFGPQASSETGVAEGYVLKPVNPKFFNNGTRVAIKCKNSKFSEKAKSDKPIKAKVELTENDKRVLEIFSEYVTWNRVSNVLSHIGSVTAKDFGRVMGLTMKDIINEAAREGHDMLFADNPSAVKKELTLLIQNTIRSKWHEVLE

SEQ ID NO: 403 - DNA, 1038 bp, synthetic construct
  misc_feature 1..1038: note = Engineered RNA ligase variants
  source 1..1038: mol_type = other DNA
atgcatcaccatcaccatcacggtggcagcggtatgtttgcgaaatattcaagtctggaaaaccattacaataataagttcattgagaagatccgtggtgcaggcttcgatatgcacaccgtggaatgggtagctcgcgagaagattcatggaacgaactttagcgttatcattactccgaccgaaatcgtcccagccaaacgcacagggccgatcttggaaggcgagtcgttctttggtcacgaaattatcatgaagaaatataaagactccttcgtgaaggtgcagaacatgctgaatgccatggatcttgttagcgtgcaaatctttggcgaatttgcgggtggtggcattcagaaaggcgtcgattacggagacaaagatttctatgtgtttgacatcctgtctgatagcgggaacgagaaagtttactgggatgactatgtagtcgaatcgtttgcaaccggcctcggtctgaaattagcgcctctgctgggacgtggtagtttcgctgaactgtcccagtacccaaacgatttcaaaagcattgtgaactattataatgaattggttgatacgacggacctggaacatgccaataaacacgtctttggtccgcaagcgtcttctgaaactggcgtagcagaaggctacgttcttaaacccgtcaacccgaaattctttaataatggtacacgcgtggcgattaaatgcaagaactccaaattttcggagaaagccaagagcgacaaaccaattaaagcgaaagtggaactgacggagaacgataaacgtgtgctcgaaatctttagcgagtatgttacctggaatcgcgtcagtaacgtactgtcacatattggctcagtgaccgcaaaagattttgggcgtgttatgggtctgacgatgaaagacatcattaatgaagcagcacgcgaaggccatgatatgttgttcgctgataacccgtcggcggtgaggaaagagctgaccattctcatccagaacacgattcgttccaaatggcacgaagttctggag

SEQ ID NO: 404 - protein, 346 aa, synthetic construct
  REGION 1..346: note = Engineered RNA ligase variants
MHHHHHHGGSGMFAKYSSLENHYNNKFIEKIRGAGFDMHTVEWVAREKIHGTNFSVIITPTEIVPAKRTGPILEGESFFGHEIIMKKYKDSFVKVQNMLNAMDLVSVQIFGEFAGGGIQKGVDYGDKDFYVFDILSDSGNEKVYWDDYVVESFATGLGLKLAPLLGRGSFAELSQYPNDFKSIVNYYNELVDTTDLEHANKHVFGPQASSETGVAEGYVLKPVNPKFFNNGTRVAIKCKNSKFSEKAKSDKPIKAKVELTENDKRVLEIFSEYVTWNRVSNVLSHIGSVTAKDFGRVMGLTMKDIINEAAREGHDMLFADNPSAVRKELTILIQNTIRSKWHEVLE

SEQ ID NO: 405 - DNA, 1038 bp, synthetic construct
  misc_feature 1..1038: note = Engineered RNA ligase variants
  source 1..1038: mol_type = other DNA
atgcatcaccatcaccatcacggtggcagcggtatgtttgcgaaatattcaagtctggaaaaccattacaataataagttcattgagaagatccgtggtgcaggcttcgatatgcacaccgtggaatgggtagctcgcgagaagattcatggaacgaactttagcgttatcattactccgaccgaaatcgtcccagccaaacgcacagggccgatcttggaaggcgagtcgttctttggtcacgaaattatcatgaagaaatataaagactccttcgtgaaggtgcagaacatgctgaatgccatggatcttgttagcgtgcaaatctttggcgaatttgcgggtggtggcattcagaaaggcgtcgattacggagacaaagatttctatgtgtttgacatcctgtctgatagcgggaacgagaaagtttactgggatgactatgtagtcgaatcgtttgcaaccggcctcggtctgaaattagcgcctctgctgggacgtggtagtttcgctgaactgtcccagtacccaaacgatttcaaaagcattgtgaactattataatgaattggttgatacgacggacctggaacatgccaataaatatgtctttggtccgcaagcgtcttctgaaactggcgtagcagaaggctacgttcttaaacccgtcaacccgaaattctttaataatggtacacgcgtggcgattaaatgcaagaactccaaattttcggagaaagccaagagcgacaaaccaattaaagcgaaagtggaactgacggagaacgataaacgtgtgctcgaaatctttagcgagtatgttacctggaatcgcgtcagtaacgtactgtcacatattggctcagtgaccgcaaaagattttgggcgtgttatgggtctgacgatgaaagacatcattaatgaagcagcacgcgaaggccatgatatgttgttcgctgataacccgtcggcggtgaagaaagagctgaccattctcatccagaacacgattcgttccaaatggcacgaagttctggag

SEQ ID NO: 406 - protein, 346 aa, synthetic construct
  REGION 1..346: note = Engineered RNA ligase variants
MHHHHHHGGSGMFAKYSSLENHYNNKFIEKIRGAGFDMHTVEWVAREKIHGTNFSVIITPTEIVPAKRTGPILEGESFFGHEIIMKKYKDSFVKVQNMLNAMDLVSVQIFGEFAGGGIQKGVDYGDKDFYVFDILSDSGNEKVYWDDYVVESFATGLGLKLAPLLGRGSFAELSQYPNDFKSIVNYYNELVDTTDLEHANKYVFGPQASSETGVAEGYVLKPVNPKFFNNGTRVAIKCKNSKFSEKAKSDKPIKAKVELTENDKRVLEIFSEYVTWNRVSNVLSHIGSVTAKDFGRVMGLTMKDIINEAAREGHDMLFADNPSAVKKELTILIQNTIRSKWHEVLE

SEQ ID NO: 407 - DNA, 1038 bp, synthetic construct
  misc_feature 1..1038: note = Engineered RNA ligase variants
  source 1..1038: mol_type = other DNA
atgcatcaccatcaccatcacggtggcagcggtatgtttgcgaaatattcaagtctggaaaaccattacaataataagttcattgagaagatccgtggtgcaggcttcgatatgcacaccgtggaatgggtagctcgcgagaagattcatggaacgaactttagcgttatcattactccgaccgaaatcgtcccagccaaacgcacagggccgatcttggaaggcgagtcgttctttggtcacgaaattatcatgaagaaatataaagactccttcgtgaaggtgcagaacatgctgaatgccatggatcttgttagcgtgcaaatctttggcgaatttgcgggtggtggcattactaaaggcgtcgattacggagacaaagatttctatgtgtttgacatcctgtctgatagcgggaacgagaaagtttactgggatgactatgtagtcgaatcgtttgcaaccggcctcggtctgaaattagcgcctctgctgggacgtggtagtttcgctgaactgtcccagtacccaaacgatttcaaaagcattgtgaactattataatgaattggttgatacgacggacctggaacatgccaataaacacgtctttggtccgcaagcgtcttctgaaactggcgtagcagaaggctacgttcttaaacccgtcaacccgaaattctttaataatggtacacgcgtggcgattaaatgcaagaactccaaattttcggagaaagccaagagcgacaaaccaattaaagcgaaagtggaactgacggagaacgataaacgtgtgctcgaaatctttagcgagtatgttacctggaatcgcgtcagtaacgtactgtcacatattggctcagtgaccgcaaaagattttgggcgtgttatgggtctgacgatgaaagacatcattaatgaagcagcacgcgaaggccatgatatgttgttcgctgataacccgtcggcggtgaagaaagagctgaccattctcatccagaacacgattcgttccaaatggcacgaagttctggag

SEQ ID NO: 408 - protein, 346 aa, synthetic construct
  REGION 1..346: note = Engineered RNA ligase variants
MHHHHHHGGSGMFAKYSSLENHYNNKFIEKIRGAGFDMHTVEWVAREKIHGTNFSVIITPTEIVPAKRTGPILEGESFFGHEIIMKKYKDSFVKVQNMLNAMDLVSVQIFGEFAGGGITKGVDYGDKDFYVFDILSDSGNEKVYWDDYVVESFATGLGLKLAPLLGRGSFAELSQYPNDFKSIVNYYNELVDTTDLEHANKHVFGPQASSETGVAEGYVLKPVNPKFFNNGTRVAIKCKNSKFSEKAKSDKPIKAKVELTENDKRVLEIFSEYVTWNRVSNVLSHIGSVTAKDFGRVMGLTMKDIINEAAREGHDMLFADNPSAVKKELTILIQNTIRSKWHEVLE

SEQ ID NO: 409 - DNA, 1038 bp, synthetic construct
  misc_feature 1..1038: note = Engineered RNA ligase variants
  source 1..1038: mol_type = other DNA
atgcatcaccatcaccatcacggtggcagcggtatgtttgcgaaatattcaagtctggaaaaccattacaataataagttcattgagaagatccgtggtgcaggcttcgatatgcacaccgtggaatgggtagctcgcgagaagattcatggaacgaactttagcgttatcattactccgaccgaaatcgtcccagccaaacgcacagggccgatcttggaaggcgagtcgttctttggtcacgaaattatcatgaagaaatataaagactccttcgtgaaggtgcagaacatgctgaatgccatggatcttgttagcgtgcaaatctttggcgaatttgcgggtggtggcattcagaaaggcgtcgattacggagacaaagatttctatgtgtttgacatcctgtctgatagcgggaacgagaaagtttactgggatgactatgtagtcgaatcgtttgcaaccggcctcggtctgaaattagcgcctctgctgggacgtggtagtttcgctgaactgtcccagtacccaaacgatttcaaaagcattgtgaactattataatgaattggttgatacgacggacctggaacatgccaataaacacgtctttggtccgcaagcgtcttctgaaattggcgtagcagaaggctacgttcttaaacccgtcaacccgaaattctttaataatggtacacgcgtggcgattaaatgcaagaactccaaattttcggagaaagccaagagcgacaaaccaattaaagcgaaagtggaactgacggagaacgataaacgtgtgctcgaaatctttagcgagtatgttacctggaatcgcgtcagtaacgtactgtcacatattggctcagtgaccgcaaaagattttgggcgtgttatgggtctgacgatgaaagacatcattaatgaagcagcacgcgaaggccatgatatgttgttcgctgataacccgtcggcggtgaagaaagagctgaccattctcatccagaacacgattcgttccaaatggcacgaagttctggag

SEQ ID NO: 410 - protein, 346 aa, synthetic construct
  REGION 1..346: note = Engineered RNA ligase variants
MHHHHHHGGSGMFAKYSSLENHYNNKFIEKIRGAGFDMHTVEWVAREKIHGTNFSVIITPTEIVPAKRTGPILEGESFFGHEIIMKKYKDSFVKVQNMLNAMDLVSVQIFGEFAGGGIQKGVDYGDKDFYVFDILSDSGNEKVYWDDYVVESFATGLGLKLAPLLGRGSFAELSQYPNDFKSIVNYYNELVDTTDLEHANKHVFGPQASSEIGVAEGYVLKPVNPKFFNNGTRVAIKCKNSKFSEKAKSDKPIKAKVELTENDKRVLEIFSEYVTWNRVSNVLSHIGSVTAKDFGRVMGLTMKDIINEAAREGHDMLFADNPSAVKKELTILIQNTIRSKWHEVLE

SEQ ID NO: 411 - DNA, 1038 bp, synthetic construct
  misc_feature 1..1038: note = Engineered RNA ligase variants
  source 1..1038: mol_type = other DNA
atggttcaccatcaccatcacggtggcagcggtatgtttgcgaaatattcaagtctggaaaaccattacaataataagttcattgagaagatccgtggtgcaggcttcgatatgcacaccgtggaatgggtagctcgcgagaagattcatggaacgaactttagcgttatcattactccgaccgaaatcgtcccagccaaacgcacagggccgatcttggaaggcgagtcgttctttggtcacgaaattatcatgaagaaatataaagactccttcgtgaaggtgcagaacatgctgaatgccatggatcttgttagcgtgcaaatctttggcgaatttgcgggtggtggcattcagaaaggcgtcgattacggagacaaagatttctatgtgtttgacatcctgtctgatagcgggaacgagaaagtttactgggatgactatgtagtcgaatcgtttgcaaccggcctcggtctgaaattagcgcctctgctgggacgtggtagtttcgctgaactgtcccagtacccaaacgatttcaaaagcattgtgaactattataatgaattggttgatacgacggacctggaacatgccaataaacacgtctttggtccgcaagcgtcttctgaaactggcgtagcagaaggctacgttcttaaacccgtcaacccgaaattctttaataatggtacacgcgtggcgattaaatgcaagaactccaaattttcggagaaagccaagagcgacaaaccaattaaagcgaaagtggaactgacggagaacgataaacgtgtgctcgaaatctttagcgagtatgttacctggaatcgcgtcagtaacgtactgtcacatattggctcagtgaccgcaaaagattttgggcgtgttatgggtctgacgatgaaagacatcattaatgaagcagcacgcgaaggccatgatatgttgttcgctgataacccgtcggcggtgaagaaagagctgaccattctcatccagaacacgattcgttccaaatggcacgaagttctggag

SEQ ID NO: 412 - protein, 346 aa, synthetic construct
  REGION 1..346: note = Engineered RNA ligase variants
MVHHHHHGGSGMFAKYSSLENHYNNKFIEKIRGAGFDMHTVEWVAREKIHGTNFSVIITPTEIVPAKRTGPILEGESFFGHEIIMKKYKDSFVKVQNMLNAMDLVSVQIFGEFAGGGIQKGVDYGDKDFYVFDILSDSGNEKVYWDDYVVESFATGLGLKLAPLLGRGSFAELSQYPNDFKSIVNYYNELVDTTDLEHANKHVFGPQASSETGVAEGYVLKPVNPKFFNNGTRVAIKCKNSKFSEKAKSDKPIKAKVELTENDKRVLEIFSEYVTWNRVSNVLSHIGSVTAKDFGRVMGLTMKDIINEAAREGHDMLFADNPSAVKKELTILIQNTIRSKWHEVLE

SEQ ID NO: 413 - DNA, 1038 bp, synthetic construct
  misc_feature 1..1038: note = Engineered RNA ligase variants
  source 1..1038: mol_type = other DNA
atgcatcaccatcaccatcacggtggcagcggtatgtttgcggaatattcaagtctggaaaaccattacaataataagttcattgagaagatccgtggggcaggcttcgatatgcacaccgtggaatgggtagctcgcgagaagattcatggaacgaactttagcgttatcattactccgaccgaaatcgtcccagccaaacgcacagggccgatcttggaaggcgagtcgttctttggtcacgaaattatcatgaaaaaatataaagactccttcgtgaaggtgcagaacatgctgaatgccatggatcttgttagcgtgcaaatctttggcgaatttgcgggtggtggcattcagaaaggcgtcgattacggagacaaagatttctatgtgtttgacatcctgtctgatagcgggaacgagaaagtttactgggatgactatcgcgtcgaatcgttttgcaccacgctcggtctgaaattagcgcctctgctgggacgtggtagtttcgctgaactgtcccagtacccaaacgatttcaaaagcattgtgaactattataatgaattggttgatacgacggacctggaacatgccaataaacacgtctttggtccgcaagcgtcttctgaaactggcgtagcagaaggctacgttcttaaacccgtcaacccgaaattctttaataatggtacacgcgtggcgattaaatgcaagaactccaaattttcggagaaagccaagagcgacaaaccaattaaagcgaaagtggaactgacggagaacgataaacgtgtgctcgaaatctttagcgagtatgttacctggaatcgcgtcagtaacgtactgtcacatattggctcagtgaccgcaaaagattttgggcgtgttatgggtctgacgatgaaagacatcattaatgaagcagcacgcgaaggccatgatatgttgttcgctgataacccgtcggcggtgaagaaagagctgaccctgctcatccagaacacgattcgttccaaatggcacgaagttctggag

SEQ ID NO: 414 - protein, 346 aa, synthetic construct
  REGION 1..346: note = Engineered RNA ligase variants
MHHHHHHGGSGMFAEYSSLENHYNNKFIEKIRGAGFDMHTVEWVAREKIHGTNFSVIITPTEIVPAKRTGPILEGESFFGHEIIMKKYKDSFVKVQNMLNAMDLVSVQIFGEFAGGGIQKGVDYGDKDFYVFDILSDSGNEKVYWDDYRVESFCTTLGLKLAPLLGRGSFAELSQYPNDFKSIVNYYNELVDTTDLEHANKHVFGPQASSETGVAEGYVLKPVNPKFFNNGTRVAIKCKNSKFSEKAKSDKPIKAKVELTENDKRVLEIFSEYVTWNRVSNVLSHIGSVTAKDFGRVMGLTMKDIINEAAREGHDMLFADNPSAVKKELTLLIQNTIRSKWHEVLE

SEQ ID NO: 415 - DNA, 1038 bp, synthetic construct
  misc_feature 1..1038: note = Engineered RNA ligase variants
  source 1..1038: mol_type = other DNA
atgcatcaccatcaccatcacggtggcagcggtatgtttgcgccgtattcaagtctggaaaaccattacaataataagttcattgagaagatccgtctggcaggcttcgatatgcacaccgtggaatgggtagctcgcgagaagattcatggaacgaactttagcgttatcattactccgaccgaaatcgtcccagccaaacgcacagggccgatcttggaaggcgagtcgttctttggtcacgaaattatcatgaaaaaatataaagactccttcgtgaaggtgcagaacatgctgaatgccatggatcttgttagcgtgcaaatctttggcgaatttgcgggtggtggcattcagaaaggcgtcgattacggagacaaagatttctatgtgtttgacatcctgtctgatagcgggaacgagaaagtttactgggatgactatgtcgtcgaatcgtttgcgaccacgctcggtctgaaattagcgcctctgctgggacgtggtagtttcgctgaactgtcccagtacccaaacgatttcaaaagcattgtgaactattataatgaattggttgatacgacggacctggaacatgccaataaacacgtctttggtccgcaagcgtcttctgaaactggcgtagcagaaggctacgttcttaaacccgtcaacccgaaattctttaataatggtacacgcgtggcgattaaatgcaagaactccaaattttcggagaaagccaagagcgacaaaccaattaaagcgaaagtggaactgacggagaacgataaacgtgtgctcgaaatctttagcgagtatgttacctggaatcgcgtcagtaacgtactgtcacatattggctcagtgaccgcaaaagattttgggcgtgttatgggtctgacgatgaaagacatcattaatgaagcagcacgcgaaggccatgatatggctttcgctgataacccgtcggcggtgaagaaagagctgaccattctcatccagaacacgattcgttccaaatggcacgaagttctggag

SEQ ID NO: 416 - protein, 346 aa, synthetic construct
  REGION 1..346: note = Engineered RNA ligase variants
MHHHHHHGGSGMFAPYSSLENHYNNKFIEKIRLAGFDMHTVEWVAREKIHGTNFSVIITPTEIVPAKRTGPILEGESFFGHEIIMKKYKDSFVKVQNMLNAMDLVSVQIFGEFAGGGIQKGVDYGDKDFYVFDILSDSGNEKVYWDDYVVESFATTLGLKLAPLLGRGSFAELSQYPNDFKSIVNYYNELVDTTDLEHANKHVFGPQASSETGVAEGYVLKPVNPKFFNNGTRVAIKCKNSKFSEKAKSDKPIKAKVELTENDKRVLEIFSEYVTWNRVSNVLSHIGSVTAKDFGRVMGLTMKDIINEAAREGHDMAFADNPSAVKKELTILIQNTIRSKWHEVLE

SEQ ID NO: 417 - DNA, 1038 bp, synthetic construct
  misc_feature 1..1038: note = Engineered RNA ligase variants
  source 1..1038: mol_type = other DNA
atgcatcaccatcaccatcacggtggcagcggtatgtttgcgtattattcaagtctggaaaaccattacaataataagttcattgagaagatccgtggggcaggcttcgatatgcacaccgtggaatgggtagctcgcgagaagattcatggaacgaactttagcgttatcattactccgaccgaaatcgtcccagccaaacgcacagggccgatcttggaaggcgagtcgttctttggtcacgaaattatcatgaaaaaatataaagactccttcgtgaaggtgcagaacatgctgaatgccatggatcttgttagcgtgcaaatctttggcgaatttgcgggtggtggcattcagaaaggcgtcgattacggagacaaagatttctatgtgtttgacatcctgtctgatagcgggaacgagaaagtttactgggatgactatgtcgtcgaatcgttttgcaccacgctcggtctgaaattagcgcctctgctgggacgtggtagtttcgctgaactgtcccagtacccaaacgatttcaaaagcattgtgaactattataatgaattggttgatacgacggacctggaacatgccaataaacacgtctttggtccgcaagcgtcttctgaaactggcgtagcagaaggctacgttcttaaacccgtcaatccgaagttctttaataatggtacacgcgtggcgattaaatgcaagaactccaaattttcggagaaagccaagagcgacaaaccaattaaagcgaaagtggaactgacggagaacgataaacgtgtgctcgaaatctttagcgagtatgttacctggaatcgcgtcagtaacgtactgtcacatattggctcagtgaccgcaaaagattttgggcgtgttatgggtctgacgatgaaagacatcattaatgaagcagcacgcgaaggccatgatatggctttcgctgataacccgtcggcggtgaagaaagagctgaccattctcatccagaacacgattcgttccaaatggcacgaagttctggag

SEQ ID NO: 418 - protein, 346 aa, synthetic construct
  REGION 1..346: note = Engineered RNA ligase variants
MHHHHHHGGSGMFAYYSSLENHYNNKFIEKIRGAGFDMHTVEWVAREKIHGTNFSVIITPTEIVPAKRTGPILEGESFFGHEIIMKKYKDSFVKVQNMLNAMDLVSVQIFGEFAGGGIQKGVDYGDKDFYVFDILSDSGNEKVYWDDYVVESFCTTLGLKLAPLLGRGSFAELSQYPNDFKSIVNYYNELVDTTDLEHANKHVFGPQASSETGVAEGYVLKPVNPKFFNNGTRVAIKCKNSKFSEKAKSDKPIKAKVELTENDKRVLEIFSEYVTWNRVSNVLSHIGSVTAKDFGRVMGLTMKDIINEAAREGHDMAFADNPSAVKKELTILIQNTIRSKWHEVLE

SEQ ID NO: 419 - DNA, 1038 bp, synthetic construct
  misc_feature 1..1038: note = Engineered RNA ligase variants
  source 1..1038: mol_type = other DNA
atgcatcaccatcaccatcacggtggcagcggtatgtttgcgaaatattcaagtctggaaaaccattacaataataagttcattgagaagatccgtggtgcaggcttcgatatgcacaccgtggaatgggtagctcgcgagaagattcatggaacgaactttagcgttatcattactccgaccgaaatcgtcccagccaaacgcacagggccgatcttggaaggcgagtcgttctttggtcacgaaattatcatgaagaaatataaagactccttcgtgaaggtgcagaacatgctgaatgccatggatcttgttagcgtgcaaatctttggcgaatttgcgggtggtggcattcagaaaggcgtcgattacggagacaaagatttctatgtgtttgacatcctgtctgatagcgggaacgagaaagtttactgggatgactatgtagtcgaatcgtttgcaacccttctcggtctgaaattagcgcctctgctgggacgtggtagtttcgctgaactgtcccagtacccaaacgatttcaaaagcattgtgaactattataatgaattggttgatacgacggacctggaacatgccaataaacacgtctttggtccgcaagcgtcttctgaaactggcgtagcagaaggctacgttcttaaacccgtcaacccgaaattctttaataatggtacacgcgtggcgattaaatgcaagaactccaaattttcggagaaagccaagagcgacaaaccaattaaagcgaaagtggaactgacggagaacgataaacgtgtgctcgaaatctttagcgagtatgttacctggaatcgcgtcagtaacgtactgtcacatattggctcagtgaccgcaaaagattttgggcgtgttatgggtctgacgatgaaagacatcattaatgaagcagcacgcgaaggccatgatatgttgttcgctgataacccgtcggcggtgaagaaagagctgaccattctcatccagaacacgattcgttccaaatggcacgaagttctggag

SEQ ID NO: 420 - protein, 346 aa, synthetic construct
  REGION 1..346: note = Engineered RNA ligase variants
MHHHHHHGGSGMFAKYSSLENHYNNKFIEKIRGAGFDMHTVEWVAREKIHGTNFSVIITPTEIVPAKRTGPILEGESFFGHEIIMKKYKDSFVKVQNMLNAMDLVSVQIFGEFAGGGIQKGVDYGDKDFYVFDILSDSGNEKVYWDDYVVESFATLLGLKLAPLLGRGSFAELSQYPNDFKSIVNYYNELVDTTDLEHANKHVFGPQASSETGVAEGYVLKPVNPKFFNNGTRVAIKCKNSKFSEKAKSDKPIKAKVELTENDKRVLEIFSEYVTWNRVSNVLSHIGSVTAKDFGRVMGLTMKDIINEAAREGHDMLFADNPSAVKKELTILIQNTIRSKWHEVLE

SEQ ID NO: 421 - DNA, 1038 bp, synthetic construct
  misc_feature 1..1038: note = Engineered RNA ligase variants
  source 1..1038: mol_type = other DNA
atgcatcaccatcaccatcacggtggcagcggtatgtttgcgaaatattcaagtctggaaaaccattacaataataagttcattgagaagatccgtggtgcaggcttcgatatgcacaccgtggaatgggtagctcgcgagaagattcatggaacgaactttagcgttatcattactccgaccgaaatcgtcccagccaaacgcacagggccgatcttggaaggcgagtcgttctttggtcacgaaattatcatgaagaaatataaagactccttcgtgaaggtgcagaacatgctgaatgccatggatcttgttagcgtgcaaatctttggcgaatttgcgggtggtggcattcagaaaggcgtcgattacggagacaaagatttctatgtgtttgacatcctgtctgatagcgggaacgagaaagtttactgggatgactatgtagtcgaatcgtttgcaaccggcctcggtctgaaattagcgcctctgctgggacgtggtagtttcgctgaactgtcccagtacccaaacgatttcaaaagcattgtgaactattataatgaattggttgatacgacggacctggaacatgccaataaacacgtctttggtccgcaagcgtcttctgaaactggcgtagcagaaggctacgttcttaaacccgtcaacccgaaattctttaataatggtacacgcgtggcgattaaatgcaagaactccaaattttcggagaaagccaagagcgacaaaccaattaaagcgaaagtggaactgacggagaacgataaacgtgtgctcgaaatctttagcgagtatgttacctggaatcgcgtcagtaacgtactgtcacatattggctcagtgaccgcaaaagattttgggcgtgttatgggtctgacgatgaaagacatcattaatgaagcagcacgcgaaggccatgatatgttgttcgctgataacccgtcggcggtgaagaaagagctgaccattctcatccaggatacgattcgttccaaatggcacgaagttctggag

SEQ ID NO: 422 - protein, 346 aa, synthetic construct
  REGION 1..346: note = Engineered RNA ligase variants
MHHHHHHGGSGMFAKYSSLENHYNNKFIEKIRGAGFDMHTVEWVAREKIHGTNFSVIITPTEIVPAKRTGPILEGESFFGHEIIMKKYKDSFVKVQNMLNAMDLVSVQIFGEFAGGGIQKGVDYGDKDFYVFDILSDSGNEKVYWDDYVVESFATGLGLKLAPLLGRGSFAELSQYPNDFKSIVNYYNELVDTTDLEHANKHVFGPQASSETGVAEGYVLKPVNPKFFNNGTRVAIKCKNSKFSEKAKSDKPIKAKVELTENDKRVLEIFSEYVTWNRVSNVLSHIGSVTAKDFGRVMGLTMKDIINEAAREGHDMLFADNPSAVKKELTILIQDTIRSKWHEVLE

SEQ ID NO: 423 - DNA, 1038 bp, synthetic construct
  misc_feature 1..1038: note = Engineered RNA ligase variants
  source 1..1038: mol_type = other DNA
atgcatcaccatcaccatcacggtggcagcggtatgtttgcgaaatattcaagtctggaaaaccattacaataataagttcattgagaagatccgtggtgcaggcttcgatatgcacaccgtggaatgggtagctcgcgagaagattcatggaacgaactttagcgttatcattactccgaccgaaatcgtcccagccaaacgcacagggccgatcttggaaggcgagtcgttctttggtcacgaaattatcatgaagaaatataaagactccttcgtgaaggtgcagaacatgctgaatgccatggatcttgttagcgtgcaaatctttggcgaatttgcgggtggtggcattcagaaaggcgtcgattacggagacaaagatttctatgtgtttgacatcctgtctgatagcgggaacgagaaagtttactgggatgactatgtagtcgaatcgtttgcaaccacgctcggtctgaaattagcgcctctgctgggacgtggtagtttcgctgaactgtcccagtacccaaacgatttcaaaagcattgtgaactattataatgaattggttgatacgacggacctggaacatgccaataaacacgtctttggtccgcaagcgtcttctgaaactggcgtagcagaaggctacgttcttaaacccgtcaacccgaaattctttaataatggtacacgcgtggcgattaaatgcaagaactccaaattttcggagaaagccaagagcgacaaaccaattaaagcgaaagtggaactgacggagaacgataaacgtgtgctcgaaatctttagcgagtatgttacctggaatcgcgtcagtaacgtactgtcacatattggctcagtgaccgcaaaagattttgggcgtgttatgggtctgacgatgaaagacatcattaatgaagcagcacgcgaaggccatgatatgttgttcgctgataacccgtcggcggtgaagaaagagctgaccattctcatccagaacacgattcgttccaaatggcacgaagttctggag

SEQ ID NO: 424 - protein, 346 aa, synthetic construct
  REGION 1..346: note = Engineered RNA ligase variants
MHHHHHHGGSGMFAKYSSLENHYNNKFIEKIRGAGFDMHTVEWVAREKIHGTNFSVIITPTEIVPAKRTGPILEGESFFGHEIIMKKYKDSFVKVQNMLNAMDLVSVQIFGEFAGGGIQKGVDYGDKDFYVFDILSDSGNEKVYWDDYVVESFATTLGLKLAPLLGRGSFAELSQYPNDFKSIVNYYNELVDTTDLEHANKHVFGPQASSETGVAEGYVLKPVNPKFFNNGTRVAIKCKNSKFSEKAKSDKPIKAKVELTENDKRVLEIFSEYVTWNRVSNVLSHIGSVTAKDFGRVMGLTMKDIINEAAREGHDMLFADNPSAVKKELTILIQNTIRSKWHEVLE

SEQ ID NO: 425 - DNA, 1038 bp, synthetic construct
  misc_feature 1..1038: note = Engineered RNA ligase variants
  source 1..1038: mol_type = other DNA
atggagcaccatcaccatcacggtggcagcggtatgtttgcgaaatattcaagtctggaaaaccattacaataataagttcattgagaagatccgtggtgcaggcttcgatatgcacaccgtggaatgggtagctcgcgagaagattcatggaacgaactttagcgttatcattactccgaccgaaatcgtcccagccaaacgcacagggccgatcttggaaggcgagtcgttctttggtcacgaaattatcatgaagaaatataaagactccttcgtgaaggtgcagaacatgctgaatgccatggatcttgttagcgtgcaaatctttggcgaatttgcgggtggtggcattcagaaaggcgtcgattacggagacaaagatttctatgtgtttgacatcctgtctgatagcgggaacgagaaagtttactgggatgactatgtagtcgaatcgtttgcaaccggcctcggtctgaaattagcgcctctgctgggacgtggtagtttcgctgaactgtcccagtacccaaacgatttcaaaagcattgtgaactattataatgaattggttgatacgacggacctggaacatgccaataaacacgtctttggtccgcaagcgtcttctgaaactggcgtagcagaaggctacgttcttaaacccgtcaacccgaaattctttaataatggtacacgcgtggcgattaaatgcaagaactccaaattttcggagaaagccaagagcgacaaaccaattaaagcgaaagtggaactgacggagaacgataaacgtgtgctcgaaatctttagcgagtatgttacctggaatcgcgtcagtaacgtactgtcacatattggctcagtgaccgcaaaagattttgggcgtgttatgggtctgacgatgaaagacatcattaatgaagcagcacgcgaaggccatgatatgttgttcgctgataacccgtcggcggtgaagaaagagctgaccattctcatccagaacacgattcgttccaaatggcacgaagttctggag

SEQ ID NO: 426 - protein, 346 aa, synthetic construct
  REGION 1..346: note = Engineered RNA ligase variants
MEHHHHHGGSGMFAKYSSLENHYNNKFIEKIRGAGFDMHTVEWVAREKIHGTNFSVIITPTEIVPAKRTGPILEGESFFGHEIIMKKYKDSFVKVQNMLNAMDLVSVQIFGEFAGGGIQKGVDYGDKDFYVFDILSDSGNEKVYWDDYVVESFATGLGLKLAPLLGRGSFAELSQYPNDFKSIVNYYNELVDTTDLEHANKHVFGPQASSETGVAEGYVLKPVNPKFFNNGTRVAIKCKNSKFSEKAKSDKPIKAKVELTENDKRVLEIFSEYVTWNRVSNVLSHIGSVTAKDFGRVMGLTMKDIINEAAREGHDMLFADNPSAVKKELTILIQNTIRSKWHEVLE

SEQ ID NO: 427 - DNA, 1038 bp, synthetic construct
  misc_feature 1..1038: note = Engineered RNA ligase variants
  source 1..1038: mol_type = other DNA
atgcatcaccatcaccatcacggtggcagcggtatgtttgcgaaatattcaagtctggaaaaccattacaataataagttcattgagaagatccgtggtgcaggcttcgatatgcacaccgtggaatgggtagctcgcgagaagattcatggaacgaactttagcgttatcattactccgaccgaaatcgtcccagccaaacgcacagggccgatcttggaaggcgagtcgttctttggtcacgaaattatcatgaagaaatataaagactccttcgtgaaggtgcagaacatgctgaatgccatggatcttgttagcgtgcaaatctttggcgaatttgcgggtggtggcattcagaaaggcgtcgattacggagacaaagatttctatgtgtttgacatcctgtctgatagcgggaacgagaaagtttactgggatgactatgtagtcgaatcgtttgcaaccggcctcggtctgaaattagcgcctctgctgggacgtggtagtttcgctgaactgtcccagtacccaaacgatttcaaaagcattgtgaactattataatgaattggttgatacgacggacctggaacatgccaataaacacgtctttggtccgcaagcgtcttctgaaactggcgtagcagaaggctacgttcttaaacccgtcaacccgaaattctttaataatggtacacgcgtggcgattaaatgcaagaactccaaattttcggagaaagccaagagcgacaaaccaattaaagcgaaagtggaactgacggagaacgataaacgtgtgctcgaaatctttagcgagtatgttacctggaatcgcgtcggtaacgtactgtcacatattggctcagtgaccgcaaaagattttgggcgtgttatgggtctgacgatgaaagacatcattaatgaagcagcacgcgaaggccatgatatgttgttcgctgataacccgtcggcggtgaagaaagagctgaccattctcatccagaacacgattcgttccaaatggcacgaagttctggag

SEQ ID NO: 428 - protein, 346 aa, synthetic construct
  REGION 1..346: note = Engineered RNA ligase variants
MHHHHHHGGSGMFAKYSSLENHYNNKFIEKIRGAGFDMHTVEWVAREKIHGTNFSVIITPTEIVPAKRTGPILEGESFFGHEIIMKKYKDSFVKVQNMLNAMDLVSVQIFGEFAGGGIQKGVDYGDKDFYVFDILSDSGNEKVYWDDYVVESFATGLGLKLAPLLGRGSFAELSQYPNDFKSIVNYYNELVDTTDLEHANKHVFGPQASSETGVAEGYVLKPVNPKFFNNGTRVAIKCKNSKFSEKAKSDKPIKAKVELTENDKRVLEIFSEYVTWNRVGNVLSHIGSVTAKDFGRVMGLTMKDIINEAAREGHDMLFADNPSAVKKELTILIQNTIRSKWHEVLE

SEQ ID NO: 429 - DNA, 1038 bp, synthetic construct
  misc_feature 1..1038: note = Engineered RNA ligase variants
  source 1..1038: mol_type = other DNA
atgcatcaccatcaccatcacggtggcagcggtatgtttgcgaaatattcaagtctggaaaaccattacaataataagttcattgagaagatccgtggtgcaggcttcgatatgcacaccgtggaatgggtagctcgcgagaagattcatggaacgaactttagcgttatcattactccgaccgaaatcgtcccagccaaacgcacagggccgatcttggaaggcgagtcgttctttggtcacgaaattatcatgaagaaatataaagactccttcgtgaaggtgcagaacatgctgaatgccatggatcttgttagcgtgcaaatctttggcgaatttgcgggtggtggcattcagaaaggcgtcgattacggagacaaagatttctatgtgtttgacatcctgtctgatagcgggaacgagcgggtttactgggatgactatgtagtcgaatcgtttgcaaccggcctcggtctgaaattagcgcctctgctgggacgtggtagtttcgctgaactgtcccagtacccaaacgatttcaaaagcattgtgaactattataatgaattggttgatacgacggacctggaacatgccaataaacacgtctttggtccgcaagcgtcttctgaaactggcgtagcagaaggctacgttcttaaacccgtcaacccgaaattctttaataatggtacacgcgtggcgattaaatgcaagaactccaaattttcggagaaagccaagagcgacaaaccaattaaagcgaaagtggaactgacggagaacgataaacgtgtgctcgaaatctttagcgagtatgttacctggaatcgcgtcagtaacgtactgtcacatattggctcagtgaccgcaaaagattttgggcgtgttatgggtctgacgatgaaagacatcattaatgaagcagcacgcgaaggccatgatatgttgttcgctgataacccgtcggcggtgaagaaagagctgaccattctcatccagaacacgattcgttccaaatggcacgaagttctggag

SEQ ID NO: 430 - protein, 346 aa, synthetic construct
  REGION 1..346: note = Engineered RNA ligase variants
MHHHHHHGGSGMFAKYSSLENHYNNKFIEKIRGAGFDMHTVEWVAREKIHGTNFSVIITPTEIVPAKRTGPILEGESFFGHEIIMKKYKDSFVKVQNMLNAMDLVSVQIFGEFAGGGIQKGVDYGDKDFYVFDILSDSGNERVYWDDYVVESFATGLGLKLAPLLGRGSFAELSQYPNDFKSIVNYYNELVDTTDLEHANKHVFGPQASSETGVAEGYVLKPVNPKFFNNGTRVAIKCKNSKFSEKAKSDKPIKAKVELTENDKRVLEIFSEYVTWNRVSNVLSHIGSVTAKDFGRVMGLTMKDIINEAAREGHDMLFADNPSAVKKELTILIQNTIRSKWHEVLE

SEQ ID NO: 431 - DNA, 1038 bp, synthetic construct
  misc_feature 1..1038: note = Engineered RNA ligase variants
  source 1..1038: mol_type = other DNA
atgcatcaccatcaccatcacggtggcagcggtatgtttgcggaatattcaagtctggaaaaccattacaataataagttcattgagaagatccgtggggcaggcttcgatatgcacaccgtggaatgggtagctcgcgagaagattcatggaacgaactttagcgttatcattactccgaccgaaatcgtcccagccaaacgcacagggccgatcttggaaggcgagtcgttctttggtcacgaaattatcatgaagaaatataaagactccttcgtgaaggtgcagaacatgctgaatgccatggatcttgttagcgtgcaaatctttggcgaatttgcgggtggtggcattcagaaaggcgtcgattacggagacaaagatttctatgtgtttgacatcctgtctgatagcgggaacgagaaagtttactgggatgactatcgcgtcgaatcgtttgcgaccgggctcggtctgaaattagcgcctctgctgggacgtggtagtttcgctgaactgtcccagtacccaaacgatttcaaaagcattgtgaactactataatgaattggttgatacgacggacctggaacatgccaataaacacgtctttggtccgcaagcgtcttctgaaactggcgtagcagaaggctacgttcttaaacccgtcaacccgaaattctttaataatggtacacgcgtggcgattaaatgcaagaactccaaattttcggagaaagccaagagcgacaaaccaattaaagcgaaagtggaactgacggagaacgataaacgtgtgctcgaaatctttagcgagtatgttacctggaatcgcgtcagtaacgtactgtcacatattggctcagtgaccgcaaaagattttgggcgtgttatgggtctgacgatgaaagacatcattaatgaagcagcacgcgaaggccatgatatgctgttcgctgataacccgtcggcggtgaagaaagagctgaccattctcatccagaacacgattcgttccaaatggcacgaagttctggag

SEQ ID NO: 432 - protein, 346 aa, synthetic construct
  REGION 1..346: note = Engineered RNA ligase variants
MHHHHHHGGSGMFAEYSSLENHYNNKFIEKIRGAGFDMHTVEWVAREKIHGTNFSVIITPTEIVPAKRTGPILEGESFFGHEIIMKKYKDSFVKVQNMLNAMDLVSVQIFGEFAGGGIQKGVDYGDKDFYVFDILSDSGNEKVYWDDYRVESFATGLGLKLAPLLGRGSFAELSQYPNDFKSIVNYYNELVDTTDLEHANKHVFGPQASSETGVAEGYVLKPVNPKFFNNGTRVAIKCKNSKFSEKAKSDKPIKAKVELTENDKRVLEIFSEYVTWNRVSNVLSHIGSVTAKDFGRVMGLTMKDIINEAAREGHDMLFADNPSAVKKELTILIQNTIRSKWHEVLE

SEQ ID NO: 433 - DNA, 1038 bp, synthetic construct
  misc_feature 1..1038: note = Engineered RNA ligase variants
  source 1..1038: mol_type = other DNA
atgcatcaccatcaccatcacggtggcagcggtatgtttgcgaaatattcaagtctggaaaaccattacaataataagttcattgagaagatccgtggtgcaggcttcgatatgcacaccgtggaatgggtagctcgcgagaagattcatggaacgaactttagcgttatcattactccgaccgaaatcgtcccagccaaacgcacagggccgatcttggaaggcgagtcgttctttggtcacgaaattatcatgaagaaatataaagactccttcgtgaaggtgcagaacatgctgaatgccatggatcttgttagcgtgcaaatctttggcgaatttgcgggtggtggcattcagaaaggcgtcgattacggagacaaagatttctatgtgtttgacatcctgtctgatagcgggaacgagaaagtttactgggatgactatgtagtcgaatcgtttgcaacccagctcggtctgaaattagcgcctctgctgggacgtggtagtttcgctgaactgtcccagtacccaaacgatttcaaaagcattgtgaactattataatgaattggttgatacgacggacctggaacatgccaataaacacgtctttggtccgcaagcgtcttctgaaactggcgtagcagaaggctacgttcttaaacccgtcaacccgaaattctttaataatggtacacgcgtggcgattaaatgcaagaactccaaattttcggagaaagccaagagcgacaaaccaattaaagcgaaagtggaactgacggagaacgataaacgtgtgctcgaaatctttagcgagtatgttacctggaatcgcgtcagtaacgtactgtcacatattggctcagtgaccgcaaaagattttgggcgtgttatgggtctgacgatgaaagacatcattaatgaagcagcacgcgaaggccatgatatgttgttcgctgataacccgtcggcggtgaagaaagagctgaccattctcatccagaacacgattcgttccaaatggcacgaagttctggag

SEQ ID NO: 434 - protein, 346 aa, synthetic construct
  REGION 1..346: note = Engineered RNA ligase variants
MHHHHHHGGSGMFAKYSSLENHYNNKFIEKIRGAGFDMHTVEWVAREKIHGTNFSVIITPTEIVPAKRTGPILEGESFFGHEIIMKKYKDSFVKVQNMLNAMDLVSVQIFGEFAGGGIQKGVDYGDKDFYVFDILSDSGNEKVYWDDYVVESFATQLGLKLAPLLGRGSFAELSQYPNDFKSIVNYYNELVDTTDLEHANKHVFGPQASSETGVAEGYVLKPVNPKFFNNGTRVAIKCKNSKFSEKAKSDKPIKAKVELTENDKRVLEIFSEYVTWNRVSNVLSHIGSVTAKDFGRVMGLTMKDIINEAAREGHDMLFADNPSAVKKELTILIQNTIRSKWHEVLE

SEQ ID NO: 435 - DNA, 1038 bp, synthetic construct
  misc_feature 1..1038: note = Engineered RNA ligase variants
  source 1..1038: mol_type = other DNA
atgcatcaccatcaccatcacggtggcagcggtatgtttgcggaatattcaagtctggaaaaccattacaataataagttcattgagaagatccgtctggcaggcttcgatatgcacaccgtggaatgggtagctcgcgagaagattcatggaacgaactttagcgttatcattactccgaccgaaatcgtcccagccaaacgcacagggccgatcttggaaggcgagtcgttctttggtcacgaaattatcatgggcaaatataaagactccttcgtgaaggtgcagaacatgctgaatgccatggatcttgttagcgtgcaaatctttggcgaatttgcgggtggtggcattcagaaaggcgtcgattacggagacaaagatttctatgtgtttgacatcctgtctgatagcgggaacgagaaagtttactgggatgactatgtcgtcgaatcgtttgcgaccacgctcggtctgaaattagcgcctctgctgggacgtggtagtttcgctgaactgtcccagtacccaaacgatttcaaaagcattgtgaactattataatgaattggttgatacgacgggcctggaacatgccaataaacacgtctttggtccgcaagcgtcttctgaaactggcgtagcagaaggctacgttcttaaacccgtcaacccgaaattctttaataatggtacacgcgtggcgattaaatgcaagaactccaaattttcggagaaagccaagagcgacaaaccaattaaagcgaaagtggaactgacggagaacgataaacgtgtgctcgaaatctttagcgagtatgttacctggaatcgcgtcagtaacgtactgtcacatattggctcagtgaccgcaaaagattttgggcgtgttatgggtctgacgatgaaagacatcattaatgaagcagcacgcgaaggccatgatatgttgttcgctgataacccgtcggcggtgaagaaagagctgaccattctcatccagaacacgattcgttccaaatggcacgaagttctggag

SEQ ID NO: 436 - protein, 346 aa, synthetic construct
  REGION 1..346: note = Engineered RNA ligase variants
MHHHHHHGGSGMFAEYSSLENHYNNKFIEKIRLAGFDMHTVEWVAREKIHGTNFSVIITPTEIVPAKRTGPILEGESFFGHEIIMGKYKDSFVKVQNMLNAMDLVSVQIFGEFAGGGIQKGVDYGDKDFYVFDILSDSGNEKVYWDDYVVESFATTLGLKLAPLLGRGSFAELSQYPNDFKSIVNYYNELVDTTGLEHANKHVFGPQASSETGVAEGYVLKPVNPKFFNNGTRVAIKCKNSKFSEKAKSDKPIKAKVELTENDKRVLEIFSEYVTWNRVSNVLSHIGSVTAKDFGRVMGLTMKDIINEAAREGHDMLFADNPSAVKKELTILIQNTIRSKWHEVLE

SEQ ID NO: 437 - DNA, 1038 bp, synthetic construct
  misc_feature 1..1038: note = Engineered RNA ligase variants
  source 1..1038: mol_type = other DNA
atgcatcaccatcaccatcacggtggcagcggtatgtttgcgaaatattcaagtctggaaaaccattacaataataagttcattgagaagatccgtggtgcaggcttcgatatgcacaccgtggaatgggtagctcgcgagaagattcatggaacgaactttagcgttatcattactccgaccgaaatcgtcccagccaaacgcacagggccgatcttggaaggcgagtcgttctttggtcacgaaattatcatgaagaaatataaagactccttcgtgaaggtgcagaacatgctgaatgccatggatcttgttagcgtgcaaatctttggcgaatttgcgggtggtggcattcagaaaggcgtcgattacggagacaaagatttctatgtgtttgacatcctgtctgatagcgggaacgagaaagtttactgggatgactatgtagtcgaatcgtttgcaaccggcctcggtctgaaattagcgcctctgctgggacgtggtagtttcgctgaactgtcccagtacccaaacgatttcaaaagcattgtgaactattataatgaattggttgatacgacggacctggaacatgccaataaacacgtctttggtccgcaagcgtcttctgaaactggcgtagcagaaggctacgttcttaaacccgtcaacccgaaattctttaataatggtacacgcgtggcgattaaatgcaagaactccaaattttcggagaaagccaagagcgacaaaccaattaaagcgaaagtggaactgacggagaacgataaacgtgtgctcgaaatctttagcgagtatgttacctggaatcgcgtcagtaacgtactgtcacatattggctcagtgaccgcaaaagattttgggcgtgttatgggtctgacgatgaaagacatcattaatgaagcagcacgcgaaggccatacgatgttgttcgctgataacccgtcggcggtgaagaaagagctgaccattctcatccagaacacgattcgttccaaatggcacgaagttctggag

SEQ ID NO: 438 - protein, 346 aa, synthetic construct
  REGION 1..346: note = Engineered RNA ligase variants
MHHHHHHGGSGMFAKYSSLENHYNNKFIEKIRGAGFDMHTVEWVAREKIHGTNFSVIITPTEIVPAKRTGPILEGESFFGHEIIMKKYKDSFVKVQNMLNAMDLVSVQIFGEFAGGGIQKGVDYGDKDFYVFDILSDSGNEKVYWDDYVVESFATGLGLKLAPLLGRGSFAELSQYPNDFKSIVNYYNELVDTTDLEHANKHVFGPQASSETGVAEGYVLKPVNPKFFNNGTRVAIKCKNSKFSEKAKSDKPIKAKVELTENDKRVLEIFSEYVTWNRVSNVLSHIGSVTAKDFGRVMGLTMKDIINEAAREGHTMLFADNPSAVKKELTILIQNTIRSKWHEVLE

SEQ ID NO: 439 - DNA, 1038 bp, synthetic construct
  misc_feature 1..1038: note = Engineered RNA ligase variants
  source 1..1038: mol_type = other DNA
atgcatcaccatcaccatcacggtggcagcggtatgtttgcgaaatattcaagtctggaaaaccattacaataataagttcattgagaagatccgtggtgcaggcttcgatatgcacaccgtggaatgggtagctcgcgagaagattcatggaacgaactttagcgttatcattactccgaccgaaatcgtcccagccaaacgcacagggccgatcttggaaggcgagtcgttctttggtcacgaaattatcatgaagaaatataaagactccttcgtgaaggtgcagaacatgctgaatgccatggatcttgttagcgtgcaaatctttggcgaatttgcgggtggtggcattcagaaaggcgtcgattacggagacaaagatttctatgtgtttgacatcctgtctgatagcgggaacgagaaagtttactgggatgactatgtagtcgaatcgtttgcaaccggcctcggtctgaaattagcgcctctgctgggacgtggtagtttcgctgaactgtcccagtacccaaacgatttcaaaagcattgtgaagtattataatgaattggttgatacgacggacctggaacatgccaataaacacgtctttggtccgcaagcgtcttctgaaactggcgtagcagaaggctacgttcttaaacccgtcaacccgaaattctttaataatggtacacgcgtggcgattaaatgcaagaactccaaattttcggagaaagccaagagcgacaaaccaattaaagcgaaagtggaactgacggagaacgataaacgtgtgctcgaaatctttagcgagtatgttacctggaatcgcgtcagtaacgtactgtcacatattggctcagtgaccgcaaaagattttgggcgtgttatgggtctgacgatgaaagacatcattaatgaagcagcacgcgaaggccatgatatgttgttcgctgataacccgtcggcggtgaagaaagagctgaccattctcatccagaacacgattcgttccaaatggcacgaagttctggag

SEQ ID NO: 440 - protein, 346 aa, synthetic construct
  REGION 1..346: note = Engineered RNA ligase variants
MHHHHHHGGSGMFAKYSSLENHYNNKFIEKIRGAGFDMHTVEWVAREKIHGTNFSVIITPTEIVPAKRTGPILEGESFFGHEIIMKKYKDSFVKVQNMLNAMDLVSVQIFGEFAGGGIQKGVDYGDKDFYVFDILSDSGNEKVYWDDYVVESFATGLGLKLAPLLGRGSFAELSQYPNDFKSIVKYYNELVDTTDLEHANKHVFGPQASSETGVAEGYVLKPVNPKFFNNGTRVAIKCKNSKFSEKAKSDKPIKAKVELTENDKRVLEIFSEYVTWNRVSNVLSHIGSVTAKDFGRVMGLTMKDIINEAAREGHDMLFADNPSAVKKELTILIQNTIRSKWHEVLE

SEQ ID NO: 441 - DNA, 1038 bp, synthetic construct
  misc_feature 1..1038: note = Engineered RNA ligase variants
  source 1..1038: mol_type = other DNA
atgcatcaccatcaccatcacggtggcagcggtatgtttgcgaaatattcaagtctggaaaaccattacaataataagttcattgagaagatccgtggtgcaggcttcgatatgtctaccgtggaatgggtagctcgcgagaagattcatggaacgaactttagcgttatcattactccgaccgaaatcgtcccagccaaacgcacagggccgatcttggaaggcgagtcgttctttggtcacgaaattatcatgaagaaatataaagactccttcgtgaaggtgcagaacatgctgaatgccatggatcttgttagcgtgcaaatctttggcgaatttgcgggtggtggcattcagaaaggcgtcgattacggagacaaagatttctatgtgtttgacatcctgtctgatagcgggaacgagaaagtttactgggatgactatgtagtcgaatcgtttgcaaccggcctcggtctgaaattagcgcctctgctgggacgtggtagtttcgctgaactgtcccagtacccaaacgatttcaaaagcattgtgaactattataatgaattggttgatacgacggacctggaacatgccaataaacacgtctttggtccgcaagcgtcttctgaaactggcgtagcagaaggctacgttcttaaacccgtcaacccgaaattctttaataatggtacacgcgtggcgattaaatgcaagaactccaaattttcggagaaagccaagagcgacaaaccaattaaagcgaaagtggaactgacggagaacgataaacgtgtgctcgaaatctttagcgagtatgttacctggaatcgcgtcagtaacgtactgtcacatattggctcagtgaccgcaaaagattttgggcgtgttatgggtctgacgatgaaagacatcattaatgaagcagcacgcgaaggccatgatatgttgttcgctgataacccgtcggcggtgaagaaagagctgaccattctcatccagaacacgattcgttccaaatggcacgaagttctggag

SEQ ID NO: 442 - protein, 346 aa, synthetic construct
  REGION 1..346: note = Engineered RNA ligase variants
MHHHHHHGGSGMFAKYSSLENHYNNKFIEKIRGAGFDMSTVEWVAREKIHGTNFSVIITPTEIVPAKRTGPILEGESFFGHEIIMKKYKDSFVKVQNMLNAMDLVSVQIFGEFAGGGIQKGVDYGDKDFYVFDILSDSGNEKVYWDDYVVESFATGLGLKLAPLLGRGSFAELSQYPNDFKSIVNYYNELVDTTDLEHANKHVFGPQASSETGVAEGYVLKPVNPKFFNNGTRVAIKCKNSKFSEKAKSDKPIKAKVELTENDKRVLEIFSEYVTWNRVSNVLSHIGSVTAKDFGRVMGLTMKDIINEAAREGHDMLFADNPSAVKKELTILIQNTIRSKWHEVLE

SEQ ID NO: 443 - DNA, 1038 bp, synthetic construct
  misc_feature 1..1038: note = Engineered RNA ligase variants
  source 1..1038: mol_type = other DNA
atgcatcaccatcaccatcacggtggcagcggtatgtttgcgaaatattcaagtctggaaaaccattacaataataagttcattgagaagatccgtggtgcaggcttcgatatgcacaccgtggaatgggtagctcgcgagaagattcatggaacgaactttagcgttatcattactccgaccgaaatcgtcccagccaaacgcacagggccgatcttggaaggcgagtcgttctttggtcacgaaattatcatgaagaaatataaagactccttcgtgaaggtgcagaacatgctgaatgccatggatcttgttagcgtgcaaatctttggcgaatttgcgggtggtggcattcagaaaggcgtcgattacggagacaaagatttctatgtgtttgacatcctgtctgatagcgggaacgagaaagtttactgggatgactatgtagtcgaatcgtttgcaaccggcctcggtctgaaattagcgcctctgctgggacgtggtagtttcgctgaactgtcccagtacccaaacgatttcaaaagcattgtgaactattataatgaattggttgatacgacggacctggaacatgccaataaacacgtctttggtccgcaagcgtcttctgaaactggcgtagcagaaggctacgttcttaaacccgtcaacccgaaattctttaataatggtacacgcgtggcgattaaatgcaagaactccaaattttcggagaaagccaagagcgacaaaccaattaaagcggctgtggaactgacggagaacgataaacgtgtgctcgaaatctttagcgagtatgttacctggaatcgcgtcagtaacgtactgtcacatattggctcagtgaccgcaaaagattttgggcgtgttatgggtctgacgatgaaagacatcattaatgaagcagcacgcgaaggccatgatatgttgttcgctgataacccgtcggcggtgaagaaagagctgaccattctcatccagaacacgattcgttccaaatggcacgaagttctggag

SEQ ID NO: 444 - protein, 346 aa, synthetic construct
  REGION 1..346: note = Engineered RNA ligase variants
MHHHHHHGGSGMFAKYSSLENHYNNKFIEKIRGAGFDMHTVEWVAREKIHGTNFSVIITPTEIVPAKRTGPILEGESFFGHEIIMKKYKDSFVKVQNMLNAMDLVSVQIFGEFAGGGIQKGVDYGDKDFYVFDILSDSGNEKVYWDDYVVESFATGLGLKLAPLLGRGSFAELSQYPNDFKSIVNYYNELVDTTDLEHANKHVFGPQASSETGVAEGYVLKPVNPKFFNNGTRVAIKCKNSKFSEKAKSDKPIKAAVELTENDKRVLEIFSEYVTWNRVSNVLSHIGSVTAKDFGRVMGLTMKDIINEAAREGHDMLFADNPSAVKKELTILIQNTIRSKWHEVLE

SEQ ID NO: 445 - DNA, 1038 bp, synthetic construct
  misc_feature 1..1038: note = Engineered RNA ligase variants
  source 1..1038: mol_type = other DNA
atgcatcaccatcaccatcacggtggcagcggtatgtttgcgtattattcaagtctggaaaaccattacaataataagttcattgagaagatccgtctggcaggcttcgatatgcacaccgtggaatgggtagctcgcgagaagattcatggaacgaactttagcgttatcattactccgaccgaaatcgtcccagccaaacgcacagggccgatcttggaaggcgagtcgttctttggtcacgaaattatcatgaagaaatataaagactccttcgtgaaggtgcagaacatgctgaatgccatggatcttgttagcgtgcaaatctttggcgaatttgcgggtggtggcattcagaaaggcgtcgattacggagacaaagatttctatgtgtttgacatcctgtctgatagcgggaacgagaaagtttactgggatgactatgtcgtcgaatcgtttgcgaccacgctcggtctgaaattagcgcctctgctgggacgtggtagtttcgctgaactgtcccagtacccaaacgatttcaaaagcattgtgaacgactataatgaattggttgatacgacggacctggaacatgccaataaacacgtctttggtccgcaagcgtcttctgaaactggcgtagcagaaggctacgttcttaaacccgtcaacccgaaattctttaataatggtacacgcgtggcgattaaatgcaagaactccaaattttcggagaaagccaagagcgacaaaccaattaaagcgaaagtggaactgacggagaacgataaacgtgtgctcgaaatctttagcgagtatgttacctggaatcgcgtcagtaacgtactgtcacatattggctcagtgaccgcaaaagattttgggcgtgttatgggtctgacgatgaaagacatcattaatgaagcagcacgcgaaggccatgatatgttgttcgctgataacccgtcggcggtgaagaaagagctgaccattctcatccagaacacgattcgttccaaatggcacgaagttctggag

SEQ ID NO: 446 - protein, 346 aa, synthetic construct
  REGION 1..346: note = Engineered RNA ligase variants
MHHHHHHGGSGMFAYYSSLENHYNNKFIEKIRLAGFDMHTVEWVAREKIHGTNFSVIITPTEIVPAKRTGPILEGESFFGHEIIMKKYKDSFVKVQNMLNAMDLVSVQIFGEFAGGGIQKGVDYGDKDFYVFDILSDSGNEKVYWDDYVVESFATTLGLKLAPLLGRGSFAELSQYPNDFKSIVNDYNELVDTTDLEHANKHVFGPQASSETGVAEGYVLKPVNPKFFNNGTRVAIKCKNSKFSEKAKSDKPIKAKVELTENDKRVLEIFSEYVTWNRVSNVLSHIGSVTAKDFGRVMGLTMKDIINEAAREGHDMLFADNPSAVKKELTILIQNTIRSKWHEVLE

SEQ ID NO: 447 - DNA, 1038 bp, synthetic construct
  misc_feature 1..1038: note = Engineered RNA ligase variants
  source 1..1038: mol_type = other DNA
atgcatcaccatcaccatcacggtggcagcggtatgtttgcgaaatattcaagtctggaaaaccattacaataataagttcattgagaagatccgtggtgcaggcttcgatatgcacaccgtggaatgggtagctcgcgagaagattcatggaacgaactttagcgttatcattactccgaccgaaatcgtcccagccaaacgcacagggccgatcttggaaggcgagtcgttctttggtcacgaaattatcatgaagaaatataaagactccttcgtgaaggtgcagaacatgctgaatgccatggatcttgttagcgtgcaaatctttggcgaatttgcgggtggtggcattcagaaaggcgtcgattacggagacaaagatttctatgtgtttgacatcctgtctgatcgggggaacgagaaagtttactgggatgactatgtagtcgaatcgtttgcaaccggcctcggtctgaaattagcgcctctgctgggacgtggtagtttcgctgaactgtcccagtacccaaacgatttcaaaagcattgtgaactattataatgaattggttgatacgacggacctggaacatgccaataaacacgtctttggtccgcaagcgtcttctgaaactggcgtagcagaaggctacgttcttaaacccgtcaacccgaaattctttaataatggtacacgcgtggcgattaaatgcaagaactccaaattttcggagaaagccaagagcgacaaaccaattaaagcgaaagtggaactgacggagaacgataaacgtgtgctcgaaatctttagcgagtatgttacctggaatcgcgtcagtaacgtactgtcacatattggctcagtgaccgcaaaagattttgggcgtgttatgggtctgacgatgaaagacatcattaatgaagcagcacgcgaaggccatgatatgttgttcgctgataacccgtcggcggtgaagaaagagctgaccattctcatccagaacacgattcgttccaaatggcacgaagttctggag

SEQ ID NO: 448 - protein, 346 aa, synthetic construct
  REGION 1..346: note = Engineered RNA ligase variants
MHHHHHHGGSGMFAKYSSLENHYNNKFIEKIRGAGFDMHTVEWVAREKIHGTNFSVIITPTEIVPAKRTGPILEGESFFGHEIIMKKYKDSFVKVQNMLNAMDLVSVQIFGEFAGGGIQKGVDYGDKDFYVFDILSDRGNEKVYWDDYVVESFATGLGLKLAPLLGRGSFAELSQYPNDFKSIVNYYNELVDTTDLEHANKHVFGPQASSETGVAEGYVLKPVNPKFFNNGTRVAIKCKNSKFSEKAKSDKPIKAKVELTENDKRVLEIFSEYVTWNRVSNVLSHIGSVTAKDFGRVMGLTMKDIINEAAREGHDMLFADNPSAVKKELTILIQNTIRSKWHEVLE

SEQ ID NO: 449 - DNA, 1038 bp, synthetic construct
  misc_feature 1..1038: note = Engineered RNA ligase variants
  source 1..1038: mol_type = other DNA
atgcatcaccatcaccatcacggtggcagcggtatgtttgcgaaatattcaagtctggaaaaccattacaataataagttcattgagaagatccgtggtgcaggcttcgatatgcacaccgtggaatgggtagctcgcgagaagattcatggaacgaactttagcgttatcattactccgaccgaaatcgtcccagccaaacgcacagggccgatcttggaaggcgagtcgttctttggtcacgaaattatcatgaagaaatataaagactccttcgtgaaggtgcagaacatgctgaatgccatggatcttgttagcgtgcaaatctttggcgaatttgcgggtggtgatattcagaaaggcgtcgattacggagacaaagatttctatgtgtttgacatcctgtctgatagcgggaacgagaaagtttactgggatgactatgtagtcgaatcgtttgcaaccggcctcggtctgaaattagcgcctctgctgggacgtggtagtttcgctgaactgtcccagtacccaaacgatttcaaaagcattgtgaactattataatgaattggttgatacgacggacctggaacatgccaataaacacgtctttggtccgcaagcgtcttctgaaactggcgtagcagaaggctacgttcttaaacccgtcaacccgaaattctttaataatggtacacgcgtggcgattaaatgcaagaactccaaattttcggagaaagccaagagcgacaaaccaattaaagcgaaagtggaactgacggagaacgataaacgtgtgctcgaaatctttagcgagtatgttacctggaatcgcgtcagtaacgtactgtcacatattggctcagtgaccgcaaaagattttgggcgtgttatgggtctgacgatgaaagacatcattaatgaagcagcacgcgaaggccatgatatgttgttcgctgataacccgtcggcggtgaagaaagagctgaccattctcatccagaacacgattcgttccaaatggcacgaagttctggag

SEQ ID NO: 450 - protein, 346 aa, synthetic construct
  REGION 1..346: note = Engineered RNA ligase variants
MHHHHHHGGSGMFAKYSSLENHYNNKFIEKIRGAGFDMHTVEWVAREKIHGTNFSVIITPTEIVPAKRTGPILEGESFFGHEIIMKKYKDSFVKVQNMLNAMDLVSVQIFGEFAGGDIQKGVDYGDKDFYVFDILSDSGNEKVYWDDYVVESFATGLGLKLAPLLGRGSFAELSQYPNDFKSIVNYYNELVDTTDLEHANKHVFGPQASSETGVAEGYVLKPVNPKFFNNGTRVAIKCKNSKFSEKAKSDKPIKAKVELTENDKRVLEIFSEYVTWNRVSNVLSHIGSVTAKDFGRVMGLTMKDIINEAAREGHDMLFADNPSAVKKELTILIQNTIRSKWHEVLE

SEQ ID NO: 451 - DNA, 1038 bp, synthetic construct
  misc_feature 1..1038: note = Engineered RNA ligase variants
  source 1..1038: mol_type = other DNA
atgcatcaccatcaccatcacggtggcagcggtatgtttgcgaaatattcaagtctggaaaaccattacaataataagttcattgagaagatccgtggtgcaggcttcgatatgcacaccgtggaatgggtagctcgcgagaagattcatggaacgaactttagcgttatcattactccgaccgaaatcgtcccagccaaacgcacagggccgatcttggaaggcgagtcgttctttggtcacgaaattatcatgaagaaatataaagactccttcgtgaaggtgcagaacatgctgaatgccatggatcttgttagcgtgcaaatctttggcgaatttgcgggtaatggcattcagaaaggcgtcgattacggagacaaagatttctatgtgtttgacatcctgtctgatagcgggaacgagaaagtttactgggatgactatgtagtcgaatcgtttgcaaccggcctcggtctgaaattagcgcctctgctgggacgtggtagtttcgctgaactgtcccagtacccaaacgatttcaaaagcattgtgaactattataatgaattggttgatacgacggacctggaacatgccaataaacacgtctttggtccgcaagcgtcttctgaaactggcgtagcagaaggctacgttcttaaacccgtcaacccgaaattctttaataatggtacacgcgtggcgattaaatgcaagaactccaaattttcggagaaagccaagagcgacaaaccaattaaagcgaaagtggaactgacggagaacgataaacgtgtgctcgaaatctttagcgagtatgttacctggaatcgcgtcagtaacgtactgtcacatattggctcagtgaccgcaaaagattttgggcgtgttatgggtctgacgatgaaagacatcattaatgaagcagcacgcgaaggccatgatatgttgttcgctgataacccgtcggcggtgaagaaagagctgaccattctcatccagaacacgattcgttccaaatggcacgaagttctggag

SEQ ID NO: 452 - protein, 346 aa, synthetic construct
  REGION 1..346: note = Engineered RNA ligase variants
MHHHHHHGGSGMFAKYSSLENHYNNKFIEKIRGAGFDMHTVEWVAREKIHGTNFSVIITPTEIVPAKRTGPILEGESFFGHEIIMKKYKDSFVKVQNMLNAMDLVSVQIFGEFAGNGIQKGVDYGDKDFYVFDILSDSGNEKVYWDDYVVESFATGLGLKLAPLLGRGSFAELSQYPNDFKSIVNYYNELVDTTDLEHANKHVFGPQASSETGVAEGYVLKPVNPKFFNNGTRVAIKCKNSKFSEKAKSDKPIKAKVELTENDKRVLEIFSEYVTWNRVSNVLSHIGSVTAKDFGRVMGLTMKDIINEAAREGHDMLFADNPSAVKKELTILIQNTIRSKWHEVLE

SEQ ID NO: 453 - DNA, 1038 bp, synthetic construct
  misc_feature 1..1038: note = Engineered RNA ligase variants
  source 1..1038: mol_type = other DNA
atgcatcaccatcaccatcacggtggcagcggtatgtttgcgaaatattcaagtctggaaaaccattacaataataagttcattgagaagatccgtggtgcaggcttcgatatgcacaccgtggaatgggtagctcgcgagaagattcatggaacgaactttagcgttatcattactccgaccgaaatcgtcccagccaaacgcacagggccgatcttggaaggcgagtcgttctttggtcacgaaattatcatgaagaaatataaagactccttcgtgaaggtgcagaacatgctgaatgccatggatcttgttagcgtgcaaatctttggcgaatttgcgggtggtggcattcagaaaggcgtcgattacggagacaaagatttctatgtgtttgacatcctgtctgatagcgggaacgagaaagtttactgggatgactatgtagtcgaatcgtttgcaaccggcctcggtctgaaattagcgcctctgctgggacgtggtagtttcgctgaactgtcccagtacccaaacgatttcaaaagcattgtgaactattataatgaattggttgatacgacggacctggaacatgccaataaacacgtctttggtccgcaagcgtcttctgaaactggcgtagcagaaggctacgttcttaaacccgtcaacccgaaattctttaataatggtacacgcgtggcgattaaatgcaagaactccaaattttcggagaaagccaagagcgacaaaccaattaaagcgaaagtggaactgacggagaacgataaacgtgtgctcgaaatctttagcgagtatgttacctggaatcgcgtcagtaacgtactgtcacatattggctcagtgaccgcaaaagattttgggcgtgttatgggtctgacgatgaaagacatcattaatgaagcagcacgcgaaggccatgatctgttgttcgctgataacccgtcggcggtgaagaaagagctgaccattctcatccagaacacgattcgttccaaatggcacgaagttctggag

SEQ ID NO: 454 - protein, 346 aa, synthetic construct
  REGION 1..346: note = Engineered RNA ligase variants
MHHHHHHGGSGMFAKYSSLENHYNNKFIEKIRGAGFDMHTVEWVAREKIHGTNFSVIITPTEIVPAKRTGPILEGESFFGHEIIMKKYKDSFVKVQNMLNAMDLVSVQIFGEFAGGGIQKGVDYGDKDFYVFDILSDSGNEKVYWDDYVVESFATGLGLKLAPLLGRGSFAELSQYPNDFKSIVNYYNELVDTTDLEHANKHVFGPQASSETGVAEGYVLKPVNPKFFNNGTRVAIKCKNSKFSEKAKSDKPIKAKVELTENDKRVLEIFSEYVTWNRVSNVLSHIGSVTAKDFGRVMGLTMKDIINEAAREGHDLLFADNPSAVKKELTILIQNTIRSKWHEVLE

SEQ ID NO: 455 - DNA, 1038 bp, synthetic construct
  misc_feature 1..1038: note = Engineered RNA ligase variants
  source 1..1038: mol_type = other DNA
atgcatcaccatcaccatcacggtggcagcggtatgtttgcgatgtattcaagtctggaaaaccattacaataataagttcattgagaagatccgtggtgcaggcttcgatatgcacaccgtggaatgggtagctcgcgagaagattcatggaacgaactttagcgttatcattactccgaccgaaatcgtcccagccaaacgcacagggccgatcttggaaggcgagtcgttctttggtcacgaaattatcatgaagaaatataaagactccttcgtgaaggtgcagaacatgctgaatgccatggatcttgttagcgtgcaaatctttggcgaatttgcgggtggtggcattcagaaaggcgtcgattacggagacaaagatttctatgtgtttgacatcctgtctgatagcgggaacgagaaagtttactgggatgactatcgcgtcgaatcgtttgcgaccgggctcggtctgaaattagcgcctctgctgggacgtggtagtttcgctgaactgtcccagtacccaaacgatttcaaaagcattgtgaactattataatgaattggttgatacgacggacctggaacatgccaataaacacgtctttggtccgcaagcgtcttctgaaactggcgtagcagaaggctacgttcttaaacccgtcaacccgaaattctttaataatggtacacgcgtggcgattaaatgcaagaactccaaattttcggagaaagccaagagcgacaaaccaattaaagcgaaagtggaactgacggagaacgataaacgtgtgctcgaaatctttagcgagtatgttacctggaatcgcgtcagtaacgtactgtcacatattggctcagtgaccgcaaaagattttgggcgtgttatgggtctgacgatgaaagacatcattaatgaagcagcacgcgaaggccatgatatgttgttcgctgataacccgtcggcggtgaagaaagagctgaccattctcatccagaacacgattcgttccaaatggcacgaagttctggag

SEQ ID NO: 456 - protein, 346 aa, synthetic construct
  REGION 1..346: note = Engineered RNA ligase variants
MHHHHHHGGSGMFAMYSSLENHYNNKFIEKIRGAGFDMHTVEWVAREKIHGTNFSVIITPTEIVPAKRTGPILEGESFFGHEIIMKKYKDSFVKVQNMLNAMDLVSVQIFGEFAGGGIQKGVDYGDKDFYVFDILSDSGNEKVYWDDYRVESFATGLGLKLAPLLGRGSFAELSQYPNDFKSIVNYYNELVDTTDLEHANKHVFGPQASSETGVAEGYVLKPVNPKFFNNGTRVAIKCKNSKFSEKAKSDKPIKAKVELTENDKRVLEIFSEYVTWNRVSNVLSHIGSVTAKDFGRVMGLTMKDIINEAAREGHDMLFADNPSAVKKELTILIQNTIRSKWHEVLE

SEQ ID NO: 457 - DNA, 1038 bp, synthetic construct
  misc_feature 1..1038: note = Engineered RNA ligase variants
  source 1..1038: mol_type = other DNA
atgcatcaccatcaccatcacggtggcagcggtatgtttgcgaaatattcaagtctggaaaaccattacaataataagttcattgagaagatccgtggtgcaggcttcgatatgcacaccgtggaatgggtagctcgcgagaagattcatggaacgaactttagcgttatcattactccgaccgaaatcgtcccagccaaacgcgatgggccgatcttggaaggcgagtcgttctttggtcacgaaattatcatgaagaaatataaagactccttcgtgaaggtgcagaacatgctgaatgccatggatcttgttagcgtgcaaatctttggcgaatttgcgggtggtggcattcagaaaggcgtcgattacggagacaaagatttctatgtgtttgacatcctgtctgatagcgggaacgagaaagtttactgggatgactatgtagtcgaatcgtttgcaaccggcctcggtctgaaattagcgcctctgctgggacgtggtagtttcgctgaactgtcccagtacccaaacgatttcaaaagcattgtgaactattataatgaattggttgatacgacggacctggaacatgccaataaacacgtctttggtccgcaagcgtcttctgaaactggcgtagcagaaggctacgttcttaaacccgtcaacccgaaattctttaataatggtacacgcgtggcgattaaatgcaagaactccaaattttcggagaaagccaagagcgacaaaccaattaaagcgaaagtggaactgacggagaacgataaacgtgtgctcgaaatctttagcgagtatgttacctggaatcgcgtcagtaacgtactgtcacatattggctcagtgaccgcaaaagattttgggcgtgttatgggtctgacgatgaaagacatcattaatgaagcagcacgcgaaggccatgatatgttgttcgctgataacccgtcggcggtgaagaaagagctgaccattctcatccagaacacgattcgttccaaatggcacgaagttctggag

SEQ ID NO: 458 - protein, 346 aa, synthetic construct
  REGION 1..346: note = Engineered RNA ligase variants
MHHHHHHGGSGMFAKYSSLENHYNNKFIEKIRGAGFDMHTVEWVAREKIHGTNFSVIITPTEIVPAKRDGPILEGESFFGHEIIMKKYKDSFVKVQNMLNAMDLVSVQIFGEFAGGGIQKGVDYGDKDFYVFDILSDSGNEKVYWDDYVVESFATGLGLKLAPLLGRGSFAELSQYPNDFKSIVNYYNELVDTTDLEHANKHVFGPQASSETGVAEGYVLKPVNPKFFNNGTRVAIKCKNSKFSEKAKSDKPIKAKVELTENDKRVLEIFSEYVTWNRVSNVLSHIGSVTAKDFGRVMGLTMKDIINEAAREGHDMLFADNPSAVKKELTILIQNTIRSKWHEVLE

SEQ ID NO: 459 - DNA, 1038 bp, synthetic construct
  misc_feature 1..1038: note = Engineered RNA ligase variants
  source 1..1038: mol_type = other DNA
atgcatcaccatcaccatcacggtggcagcggtatgtttgcgaaatattcaagtctggaaaaccattacaataataagttcattgagaagatccgtggtgcaggcttcgatatgcacaccgtggaatgggtagctcgcgagaagattcatggaacgaactttagcgttatcattactccgaccgaaatcgtcccagccaaacgcacagggccgatcttggaaggcgagtcgttctttggtcacgaaattatcatgaagaaatataaagactccttcgtgaaggtgcagaacatgctgaatgccatggatcttgttagcgtgcaaatctttggcgaatttgcgggtggtggcattcagaaaggcgtcgattacggagacaaagatttctatgtgtttgacatcctgtctgatagcgggaacgagaaagtttactgggatgactatgtagtcgaatcgtttgcaaccaatctcggtctgaaattagcgcctctgctgggacgtggtagtttcgctgaactgtcccagtacccaaacgatttcaaaagcattgtgaactattataatgaattggttgatacgacggacctggaacatgccaataaacacgtctttggtccgcaagcgtcttctgaaactggcgtagcagaaggctacgttcttaaacccgtcaacccgaaattctttaataatggtacacgcgtggcgattaaatgcaagaactccaaattttcggagaaagccaagagcgacaaaccaattaaagcgaaagtggaactgacggagaacgataaacgtgtgctcgaaatctttagcgagtatgttacctggaatcgcgtcagtaacgtactgtcacatattggctcagtgaccgcaaaagattttgggcgtgttatgggtctgacgatgaaagacatcattaatgaagcagcacgcgaaggccatgatatgttgttcgctgataacccgtcggcggtgaagaaagagctgaccattctcatccagaacacgattcgttccaaatggcacgaagttctggag

SEQ ID NO: 460 - protein, 346 aa, synthetic construct
  REGION 1..346: note = Engineered RNA ligase variants
MHHHHHHGGSGMFAKYSSLENHYNNKFIEKIRGAGFDMHTVEWVAREKIHGTNFSVIITPTEIVPAKRTGPILEGESFFGHEIIMKKYKDSFVKVQNMLNAMDLVSVQIFGEFAGGGIQKGVDYGDKDFYVFDILSDSGNEKVYWDDYVVESFATNLGLKLAPLLGRGSFAELSQYPNDFKSIVNYYNELVDTTDLEHANKHVFGPQASSETGVAEGYVLKPVNPKFFNNGTRVAIKCKNSKFSEKAKSDKPIKAKVELTENDKRVLEIFSEYVTWNRVSNVLSHIGSVTAKDFGRVMGLTMKDIINEAAREGHDMLFADNPSAVKKELTILIQNTIRSKWHEVLE

SEQ ID NO: 461 - DNA, 1038 bp, synthetic construct
  misc_feature 1..1038: note = Engineered RNA ligase variants
  source 1..1038: mol_type = other DNA
atgcatcaccatcaccatcacggtggcagcggtatgtttgcgaaatattcaagtctggaaaaccattacaataataagttcattgagaagatccgtggtgcaggcttcgatatgcacaccgtggaatgggtagctcgcgagaagattcatggaacgaactttagcgttatcattactccgaccgaaatcgtcccagccaaacgcacagggccgatcttggaaggcgagtcgttctttggtcacgaaattatcatgaagaaatataaagactccttcgtgaaggtgcagaacatgctgaatgccatggatcttgttagcgtgcaaatctttggcgaatttgcgggtggtggcattcagaaaggcgtcgattacggagacaaagatttctatgtgtttgacatcctgtctgatagcgggaacgagaaagtttactgggatgactatgtagtcgaatcgtttgcaaccggcctcggtctgaaattagcgcctctgctgggacgtggtagtttcgctgaactgtcccagtacccaaacgatttcaaaagcattgtgaactattataatgaattggttgatacgacggacctggaacatgccaataaacacgtctttggtccgcaagcgtcttctgaaactggcgtagcagaaggctacgttcttaaacccgtcaacccgaaattctttaataatggtacacgcgtggcgattaaatgcaagaactccaaattttcggagaaagccaagagcgacaaaccaattaaagcgaaagtggaactgacggagaacgataaacgtgtgctcgaaatctttagcgagtatgttacctggaatcgcgtcagtaacgtactgtcacatattggctcagtgaccgcaaaagattttgggcgtgttatgggtctgacgatgaaagacatcattaatgaagcaaagcgcgaaggccatgatatgttgttcgctgataacccgtcggcggtgaagaaagagctgaccattctcatccagaacacgattcgttccaaatggcacgaagttctggag

SEQ ID NO: 462 - protein, 346 aa, synthetic construct
  REGION 1..346: note = Engineered RNA ligase variants
MHHHHHHGGSGMFAKYSSLENHYNNKFIEKIRGAGFDMHTVEWVAREKIHGTNFSVIITPTEIVPAKRTGPILEGESFFGHEIIMKKYKDSFVKVQNMLNAMDLVSVQIFGEFAGGGIQKGVDYGDKDFYVFDILSDSGNEKVYWDDYVVESFATGLGLKLAPLLGRGSFAELSQYPNDFKSIVNYYNELVDTTDLEHANKHVFGPQASSETGVAEGYVLKPVNPKFFNNGTRVAIKCKNSKFSEKAKSDKPIKAKVELTENDKRVLEIFSEYVTWNRVSNVLSHIGSVTAKDFGRVMGLTMKDIINEAKREGHDMLFADNPSAVKKELTILIQNTIRSKWHEVLE

SEQ ID NO: 463 - DNA, 1038 bp, synthetic construct
  misc_feature 1..1038: note = Engineered RNA ligase variants
  source 1..1038: mol_type = other DNA
atgcatcaccatcaccatcacggtggcagcggtatgtttgcgaaatattcaagtctggaaaaccattacaataataagttcattgagaagatccgtggtgcaggcttcgatatgcacaccgtggaatgggtagctcgcgagaagattcatggaacgaactttagcgttatcattactccgaccgaaatcgtcccagccaaacgcacagggccgatcttggaaggcgagtcgttctttggtcacgaaattatcatgaagaaatataaagactccttcgtgaaggtgcagaacatgctgaatgccatggatcttgttagcgtgcaaatctttggcgaatttgcgggtggtggcattcagaaaggcgtcgattacggagacaaagatttctatgtgtttgacatcctgtctgatagcgggaacgagaaagtttactgggatgactatgtagtcgaatcgtttgcaaccggcctcggtctgaaattagcgcctctgctgggacgtggtagtttcgctgaactgtcccagtacccaaacgatttcaaaagcattgtgaactattataatgaattggttgatacgacggacctggaacatgccaataaacacgtctttggtccgcaagcgtcttctgaaactggcgtagcagaaggctacgttcttaaacccgtcaacccgaaattctttaataatggtacacgcgtggcgattaaatgcaagaactccaaattttcggagaaagccaagagcgacaaaccaattaaagcgaaagtggaactgacggagaacgataaacgtgtgctcgaaatctttagcgagtatgttacctggaatcgcgtcagtaacgtactgtcacatattggctcagtgaccgcaaaagattttgggcgtgttatgggtctgacgatgaaagacatcattaatgaagcagcacgcgaaggccatgatatggctttcgctgataacccgtcggcggtgaagaaagagctgaccattctcatccagaacacgattcgttccaaatggcacgaagttctggag

SEQ ID NO: 464 - protein, 346 aa, synthetic construct
  REGION 1..346: note = Engineered RNA ligase variants
MHHHHHHGGSGMFAKYSSLENHYNNKFIEKIRGAGFDMHTVEWVAREKIHGTNFSVIITPTEIVPAKRTGPILEGESFFGHEIIMKKYKDSFVKVQNMLNAMDLVSVQIFGEFAGGGIQKGVDYGDKDFYVFDILSDSGNEKVYWDDYVVESFATGLGLKLAPLLGRGSFAELSQYPNDFKSIVNYYNELVDTTDLEHANKHVFGPQASSETGVAEGYVLKPVNPKFFNNGTRVAIKCKNSKFSEKAKSDKPIKAKVELTENDKRVLEIFSEYVTWNRVSNVLSHIGSVTAKDFGRVMGLTMKDIINEAAREGHDMAFADNPSAVKKELTILIQNTIRSKWHEVLE

SEQ ID NO: 465 - DNA, 1038 bp, synthetic construct
  misc_feature 1..1038: note = Engineered RNA ligase variants
  source 1..1038: mol_type = other DNA
atgcatcaccatcaccatcacggtggcagcggtatgtttgcgtattattcaagtctggaaaaccattacaataataagttcattgagaagatccgtggtgcaggcttcgatatgcacaccgtggaatgggtagctcgcgagaagattcatggaacgaactttagcgttatcattactccgaccgaaatcgtcccagccaaacgcacagggccgatcttggaaggcgagtcgttctttggtcacgaaattatcatgaagaaatataaagactccttcgtgaaggtgcagaacatgctgaatgccatggatcttgttagcgtgcaaatctttggcgaatttgcgggtggtggcattcagaaaggcgtcgattacggagacaaagatttctatgtgtttgacatcctgtctgatagcgggaacgagaaagtttactgggatgactatgtagtcgaatcgtttgcaaccggcctcggtctgaaattagcgcctctgctgggacgtggtagtttcgctgaactgtcccagtacccaaacgatttcaaaagcattgtgaactactataatgaattggttgatacgacgggcctggaacatgccaataaacacgtctttggtccgcaagcgtcttctgaaactggcgtagcagaaggctacgttcttaaacccgtcaacccgaaattctttaataatggtacacgcgtggcgattaaatgcaagaactccaaattttcggagaaagccaagagcgacaaaccaattaaagcgaaagtggaactgacggagaacgataaacgtgtgctcgaaatctttagcgagtatgttacctggaatcgcgtcagtaacgtactgtcacatattggctcagtgaccgcaaaagattttgggcgtgttatgggtctgacgatgaaagacatcattaatgaagcagcacgcgaaggccatgatatgctgttcgctgataacccgtcggcggtgaagaaagagctgaccctgctcatccagaacacgattcgttccaaatggcacgaagttctggag

SEQ ID NO: 466 - protein, 346 aa, synthetic construct
  REGION 1..346: note = Engineered RNA ligase variants
MHHHHHHGGSGMFAYYSSLENHYNNKFIEKIRGAGFDMHTVEWVAREKIHGTNFSVIITPTEIVPAKRTGPILEGESFFGHEIIMKKYKDSFVKVQNMLNAMDLVSVQIFGEFAGGGIQKGVDYGDKDFYVFDILSDSGNEKVYWDDYVVESFATGLGLKLAPLLGRGSFAELSQYPNDFKSIVNYYNELVDTTGLEHANKHVFGPQASSETGVAEGYVLKPVNPKFFNNGTRVAIKCKNSKFSEKAKSDKPIKAKVELTENDKRVLEIFSEYVTWNRVSNVLSHIGSVTAKDFGRVMGLTMKDIINEAAREGHDMLFADNPSAVKKELTLLIQNTIRSKWHEVLE

SEQ ID NO: 467 - DNA, 1038 bp, synthetic construct
  misc_feature 1..1038: note = Engineered RNA ligase variants
  source 1..1038: mol_type = other DNA
atgcatcaccatcaccatcacggtggcagcggtatgtttgcgatgtattcaagtctggaaaaccattacaataataagttcattgagaagatccgtctggcaggcttcgatatgcacaccgtggaatgggtagctcgcgagaagattcatggaacgaactttagcgttatcattactccgaccgaaatcgtcccagccaaacgcacagggccgatcttggaaggcgagtcgttctttggtcacgaaattatcatgaagaaatataaagactccttcgtgaaggtgcagaacatgctgaatgccatggatcttgttagcgtgcaaatctttggcgaatttgcgggtggtggcattcagaaaggcgtcgattacggagacaaagatttctatgtgtttgacatcctgtctgatagcgggaacgagaaagtttactgggatgactatgtagtcgaatcgtttgcaaccggcctcggtctgaaattagcgcctctgctgggacgtggtagtttcgctgaactgtcccagtacccaaacgatttcaaaagcattgtgaactactataatgaattggttgatacgacggacctggaacatgccaataaacacgtctttggtccgcaagcgtcttctgaaactggcgtagcagaaggctacgttcttaaacccgtcaacccgaaattctttaataatggtacacgcgtggcgattaaatgcaagaactccaaattttcggagaaagccaagagcgacaaaccaattaaagcgaaagtggaactgacggagaacgataaacgtgtgctcgaaatctttagcgagtatgttacctggaatcgcgtcagtaacgtactgtcacatattggctcagtgaccgcaaaagattttgggcgtgttatgggtctgacgatgaaagacatcattaatgaagcagcacgcgaaggccatgatatgttgttcgctgataacccgtcggcggtgaagaaagagctgaccctgctcatccagaacacgattcgttccaaatggcacgaagttctggag

SEQ ID NO: 468 - protein, 346 aa, synthetic construct
  REGION 1..346: note = Engineered RNA ligase variants
MHHHHHHGGSGMFAMYSSLENHYNNKFIEKIRLAGFDMHTVEWVAREKIHGTNFSVIITPTEIVPAKRTGPILEGESFFGHEIIMKKYKDSFVKVQNMLNAMDLVSVQIFGEFAGGGIQKGVDYGDKDFYVFDILSDSGNEKVYWDDYVVESFATGLGLKLAPLLGRGSFAELSQYPNDFKSIVNYYNELVDTTDLEHANKHVFGPQASSETGVAEGYVLKPVNPKFFNNGTRVAIKCKNSKFSEKAKSDKPIKAKVELTENDKRVLEIFSEYVTWNRVSNVLSHIGSVTAKDFGRVMGLTMKDIINEAAREGHDMLFADNPSAVKKELTLLIQNTIRSKWHEVLE

SEQ ID NO: 469 - DNA, 1038 bp, synthetic construct
  misc_feature 1..1038: note = Engineered RNA ligase variants
  source 1..1038: mol_type = other DNA
atgcatcaccatcaccatcacggtggcagcggtatgtttgcgaaatattcaagtctggaaaaccattacaataataagttcattgagaagatccgtggtgcaggcttcgatatgcacaccgtggaatgggtagctcgcgagaagattcatggaacgaactttagcgttatcattactccgaccgaaatcgtcccagccaaacgcacagggccgatcttggaaggcgagtcgttctttggtcacgaaattatcatgaagaaatataaagactccttcgtgaaggtgcagaacatgctgaatgccatggatcttgttagcgtgcaaatctttggcgaatttgcgggtggtggcattcagaaaggcgtcgattacggagacaaagatttctatgtgtttgacatcctgtctgatagcgggaacgagaaagtttactgggatgactatgtagtcgaatcgtttgcaaccggcctcggtctgaaattagcgcctctgctgggacgtggtagtttcgctgaactgtcccagtacccaaacgatttcaaaagcattgtgaactattataatgaattggttgatacgacggacctggaacatgccaataaacacgtctttggtccgcaagcgtcttctgaaactggcgtagcagaaggctacgttcttaaacccgtcaacccgaaattctttaataatggtacacgcgtggcgattaaatgcaagaactccaaattttcggagaaagccaagagcgacaaaccaattaaagcgaaagtggaactgacggagaacgataaacgtgtgctcgaaatctttagcgagtatgttacctggaatcgcgtcagtaacgtactgtcacatattggctcagtgaccgcaaaagattttgggcgtgttatgggtctgacgatgaaagacatcattaatgaagcagcacgcgaaggccatgatatgttgttcgctgataacccgtcggcggtgaagaaagagctgatgattctcatccagaacacgattcgttccaaatggcacgaagttctggag

SEQ ID NO: 470 - protein, 346 aa, synthetic construct
  REGION 1..346: note = Engineered RNA ligase variants
MHHHHHHGGSGMFAKYSSLENHYNNKFIEKIRGAGFDMHTVEWVAREKIHGTNFSVIITPTEIVPAKRTGPILEGESFFGHEIIMKKYKDSFVKVQNMLNAMDLVSVQIFGEFAGGGIQKGVDYGDKDFYVFDILSDSGNEKVYWDDYVVESFATGLGLKLAPLLGRGSFAELSQYPNDFKSIVNYYNELVDTTDLEHANKHVFGPQASSETGVAEGYVLKPVNPKFFNNGTRVAIKCKNSKFSEKAKSDKPIKAKVELTENDKRVLEIFSEYVTWNRVSNVLSHIGSVTAKDFGRVMGLTMKDIINEAAREGHDMLFADNPSAVKKELMILIQNTIRSKWHEVLE

SEQ ID NO: 471 - DNA, 1038 bp, synthetic construct
  misc_feature 1..1038: note = Engineered RNA ligase variants
  source 1..1038: mol_type = other DNA
atgcatcaccatcaccatcacggtggcagcggtatgtttgcgaaatattcaagtctggaaaaccattacaataataagttcattgagaagatccgtggtgcaggcttcgatatgcacaccgtggaatgggtagctcgcgagaagattcatggaacgaactttagcgttatcattactccgaccgaaatcgtcccagccaaacgcacagggccgatcttggaaggcgagtcgttctttggtcacgaaattatcatgaagaaatataaagactccttcgtgaaggtgcagaacatgctgaatgccatggatcttgttagcgtgcaaatctttggcgaatttgcgggtggtggcattcagaaaggcgtcgattacggagacaaagatttctatgtgtttgacatcctgtctgatagcgggaacgagaaagtttactgggatgactatgtagtcgaatcgtttgcaaccggcctcggtctgaaattagcgcctctgctgggacgtggtagtttcgctgaactgtcccagtacccaaacgatttcaaaagcattgtgaactattataatgaattggttgatacgacggacctggaacatgccaataaacacgtctttggtccgcaagcgtcttctgaaactggcgtagcagaaggctacgttcttaaacccgtcaacccgaaattctttaataatggtacacgcgtggcgattaaatgcaagaactccaaattttcggagaaagccaagagcgacaaaccaattaaagcgaaagtggaactgacggagaacgataaacgtgtgctcgaaatctttagcgagtatgttacctggaatcgcgtcagtaacgtactgtcacatattggctcagtgaccgcaaaagattttgggcgtgttatgggtctgacgatgaaagacatcattaatgaagcagcacgcgaaggctgggatatgttgttcgctgataacccgtcggcggtgaagaaagagctgaccattctcatccagaacacgattcgttccaaatggcacgaagttctggag

SEQ ID NO: 472 - protein, 346 aa, synthetic construct
  REGION 1..346: note = Engineered RNA ligase variants
MHHHHHHGGSGMFAKYSSLENHYNNKFIEKIRGAGFDMHTVEWVAREKIHGTNFSVIITPTEIVPAKRTGPILEGESFFGHEIIMKKYKDSFVKVQNMLNAMDLVSVQIFGEFAGGGIQKGVDYGDKDFYVFDILSDSGNEKVYWDDYVVESFATGLGLKLAPLLGRGSFAELSQYPNDFKSIVNYYNELVDTTDLEHANKHVFGPQASSETGVAEGYVLKPVNPKFFNNGTRVAIKCKNSKFSEKAKSDKPIKAKVELTENDKRVLEIFSEYVTWNRVSNVLSHIGSVTAKDFGRVMGLTMKDIINEAAREGWDMLFADNPSAVKKELTILIQNTIRSKWHEVLE

SEQ ID NO: 473 - DNA, 1038 bp, synthetic construct
  misc_feature 1..1038: note = Engineered RNA ligase variants
  source 1..1038: mol_type = other DNA
atgcatcaccatcaccatcacggtggcagcggtatgtttgcgaaatattcaagtctggaaaaccattacaataataagttcattgagaagatccgtggtgcaggcttcgatatgcacaccgtggaatgggtagctcgcgagaagattcatggaacgaactttagcgttatcattactccgaccgaaatcgtcccagccaaacgcacagggccgatcttggaaggcgagtcgttctttggtcacgaaattatcatgaagaaatataaagactccttcgtgaaggtgcagaacatgctgaatgccatggatcttgttagcgtgcaaatctttggcgaatttgcgggtggtggcattcagaaaggcgtcgattacggagacaaagatttctatgtgtttgacatcctgtctgatagcgggaacgagaaagtttggtgggatgactatgtagtcgaatcgtttgcaaccggcctcggtctgaaattagcgcctctgctgggacgtggtagtttcgctgaactgtcccagtacccaaacgatttcaaaagcattgtgaactattataatgaattggttgatacgacggacctggaacatgccaataaacacgtctttggtccgcaagcgtcttctgaaactggcgtagcagaaggctacgttcttaaacccgtcaacccgaaattctttaataatggtacacgcgtggcgattaaatgcaagaactccaaattttcggagaaagccaagagcgacaaaccaattaaagcgaaagtggaactgacggagaacgataaacgtgtgctcgaaatctttagcgagtatgttacctggaatcgcgtcagtaacgtactgtcacatattggctcagtgaccgcaaaagattttgggcgtgttatgggtctgacgatgaaagacatcattaatgaagcagcacgcgaaggccatgatatgttgttcgctgataacccgtcggcggtgaagaaagagctgaccattctcatccagaacacgattcgttccaaatggcacgaagttctggag

SEQ ID NO: 474 - protein, 346 aa, synthetic construct
  REGION 1..346: note = Engineered RNA ligase variants
MHHHHHHGGSGMFAKYSSLENHYNNKFIEKIRGAGFDMHTVEWVAREKIHGTNFSVIITPTEIVPAKRTGPILEGESFFGHEIIMKKYKDSFVKVQNMLNAMDLVSVQIFGEFAGGGIQKGVDYGDKDFYVFDILSDSGNEKVWWDDYVVESFATGLGLKLAPLLGRGSFAELSQYPNDFKSIVNYYNELVDTTDLEHANKHVFGPQASSETGVAEGYVLKPVNPKFFNNGTRVAIKCKNSKFSEKAKSDKPIKAKVELTENDKRVLEIFSEYVTWNRVSNVLSHIGSVTAKDFGRVMGLTMKDIINEAAREGHDMLFADNPSAVKKELTILIQNTIRSKWHEVLE

SEQ ID NO: 475 - DNA, 1038 bp, synthetic construct
  misc_feature 1..1038: note = Engineered RNA ligase variants
  source 1..1038: mol_type = other DNA
atgcatcaccatcaccatcacggtggcagcggtatgtttgcgtattattcaagtctggaaaaccattacaataataagttcattgagaagatccgtggtgcaggcttcgatatgcacaccgtggaatgggtagctcgcgagaagattcatggaacgaactttagcgttatcattactccgaccgaaatcgtcccagccaaacgcacagggccgatcttggaaggcgagtcgttctttggtcacgaaattatcatgaagaaatataaagactccttcgtgaaggtgcagaacatgctgaatgccatggatcttgttagcgtgcaaatctttggcgaatttgcgggtggtggcattcagaaaggcgtcgattacggagacaaagatttctatgtgtttgacatcctgtctgatagcgggaacgagaaagtttactgggatgactatcgcgtcgaatcgtttgcgaccgggctcggtctgaaattagcgcctctgctgggacgtggtagtttcgctgaactgtcccagtacccaaacgatttcaaaagcattgtgaactattataatgaattggttgatacgacggacctggaacatgccaataaacacgtctttggtccgcaagcgtcttctgaaactggcgtagcagaaggctacgttcttaaacccgtcaacccgaaattctttaataatggtacacgcgtggcgattaaatgcaagaactccaaattttcggagaaagccaagagcgacaaaccaattaaagcgaaagtggaactgacggagaacgataaacgtgtgctcgaaatctttagcgagtatgttacctggaatcgcgtcagtaacgtactgtcacatattggctcagtgaccgcaaaagattttgggcgtgttatgggtctgacgatgaaagacatcattaatgaagcagcacgcgaaggccatgatatgctgttcgctgataacccgtcggcggtgaagaaagagctgaccattctcatccagaacacgattcgttccaaatggcacgaagttctggag

SEQ ID NO: 476 - protein, 346 aa, synthetic construct
  REGION 1..346: note = Engineered RNA ligase variants
MHHHHHHGGSGMFAYYSSLENHYNNKFIEKIRGAGFDMHTVEWVAREKIHGTNFSVIITPTEIVPAKRTGPILEGESFFGHEIIMKKYKDSFVKVQNMLNAMDLVSVQIFGEFAGGGIQKGVDYGDKDFYVFDILSDSGNEKVYWDDYRVESFATGLGLKLAPLLGRGSFAELSQYPNDFKSIVNYYNELVDTTDLEHANKHVFGPQASSETGVAEGYVLKPVNPKFFNNGTRVAIKCKNSKFSEKAKSDKPIKAKVELTENDKRVLEIFSEYVTWNRVSNVLSHIGSVTAKDFGRVMGLTMKDIINEAAREGHDMLFADNPSAVKKELTILIQNTIRSKWHEVLE

SEQ ID NO: 477 - DNA, 1038 bp, synthetic construct
  misc_feature 1..1038: note = Engineered RNA ligase variants
  source 1..1038: mol_type = other DNA
atgcatcaccatcaccatcacggtggcagcggtatgtttgcgaaatattcaagtctggaaaaccattacaataataagttcattgagaagatccgtggtgcaggcttcgatatgcacaccgtggaatgggtagctcgcgagaagattcatggaacgaactttagcgttatcattactccgaccgaaatcgtcccagccaaacgcacagggccgatcttggaaggcgagtcgttctttggtcacgaaattatcatgaagaaatataaagactccttcgtgaaggtgcagaacatgctgaatgccatggatcttgttagcgtgcaaatctttggcgaatttgcgggtggtggcattcagaaaggcgtcgattacggagacaaagatttctatgtgtttgacatcctgtctgatagcgggaacgagaaagtttactgggatgactatgtagtcgaatcgtttgcaaccggcctcggtctgaaattagcgcctctgctgggacgtggtagtttcgctgaactgtcccagtacccaaacgatttcaaaagcattgtgaactattataatgaattggttgatacgacggacctggaacatgccaataaacacgtctttggtccgcaagcgtcttctgaaactggcgtagcagaaggctacgttcttaaacccgtcaacccgaaattctttaataatggtacacgcgtggcgattaaatgcaagaactccaaattttcggagaaagccaagagcgacaaaccaattaaagcgaaagtggaactgacggagaacgataaacgtgtgctcgaaatctttagcgagtatgttacctggaatcgcgtcagtaacgtactgtcacatattggctcagtgaccgcaaaagattttgggcgtgttatgggtctgacgatgaaagacatcattaatgaagcagcacgcgaaggccatagtatgttgttcgctgataacccgtcggcggtgaagaaagagctgaccattctcatccagaacacgattcgttccaaatggcacgaagttctggag

SEQ ID NO: 478 - protein, 346 aa, synthetic construct
  REGION 1..346: note = Engineered RNA ligase variants
MHHHHHHGGSGMFAKYSSLENHYNNKFIEKIRGAGFDMHTVEWVAREKIHGTNFSVIITPTEIVPAKRTGPILEGESFFGHEIIMKKYKDSFVKVQNMLNAMDLVSVQIFGEFAGGGIQKGVDYGDKDFYVFDILSDSGNEKVYWDDYVVESFATGLGLKLAPLLGRGSFAELSQYPNDFKSIVNYYNELVDTTDLEHANKHVFGPQASSETGVAEGYVLKPVNPKFFNNGTRVAIKCKNSKFSEKAKSDKPIKAKVELTENDKRVLEIFSEYVTWNRVSNVLSHIGSVTAKDFGRVMGLTMKDIINEAAREGHSMLFADNPSAVKKELTILIQNTIRSKWHEVLE

SEQ ID NO: 479 - DNA, 1038 bp, synthetic construct
  misc_feature 1..1038: note = Engineered RNA ligase variants
  source 1..1038: mol_type = other DNA
atggaacaccatcaccatcacggtggcagcggtatgtttgcctattattcaagtctggaaaaccattacaataataagttcattgagaagatccgtggtgcaggcttcgatatgagtaccgtggaatgggtagctcgcgagaagattcatggaacgaactttagcgttatcattactccgaccgaaatcgtcccagccaaacgcgacgggccgatcttggaaggcgagtcgttctttggtcacgaaattatcatgaaaaaatataaagactccttcgtgaaggtgcagaacatgctgaatgccatggatcttgttagcgtgcaaatctttggcgaatttgcgggtgggggcattcaaaaaggcgtcgattacggagacaaagatttctatgtgtttgacatcctgtctgatagcgggaacgagaaagtttggtgggatgactatcgcgtcgaatcgttttgcaccctgctcggtctgaaattagcgcctctgctgggacgtggtagtttcgctgaactgtcccagtacccaaacgatttcaaaagcattgtgaaccgttataatgaattggttgatacgacgggcctggaacatgccaataaacatgtctttggtccgcaagcgtcttctgaaactggcgtagcagaaggctacgttcttaaacccgtctatccgatcttctttaataatggtacacgcgtggcgattaaatgcaagaactccaaattttcggagaaagccaagagcgacaaaccaattaaagcgaaagtggaactgacggagaacgataaacgtgtgctcgaaatctttagcgagtatgttacctggaatcgcgtcagtaacgtactgtcacatattggctcagtgaccgcaaaagattttgggcgtgttatgggtctgacgatgaaagacatcattaatgaagcagcacgcgaaggccatgatctgttgttcgctgataacccgtcggcggtgaagaaagagctgatgattctcatccagaacacgattcgttccaaatggcacgaagttctggag

SEQ ID NO: 480 - protein, 346 aa, synthetic construct
  REGION 1..346: note = Engineered RNA ligase variants
MEHHHHHGGSGMFAYYSSLENHYNNKFIEKIRGAGFDMSTVEWVAREKIHGTNFSVIITPTEIVPAKRDGPILEGESFFGHEIIMKKYKDSFVKVQNMLNAMDLVSVQIFGEFAGGGIQKGVDYGDKDFYVFDILSDSGNEKVWWDDYRVESFCTLLGLKLAPLLGRGSFAELSQYPNDFKSIVNRYNELVDTTGLEHANKHVFGPQASSETGVAEGYVLKPVYPIFFNNGTRVAIKCKNSKFSEKAKSDKPIKAKVELTENDKRVLEIFSEYVTWNRVSNVLSHIGSVTAKDFGRVMGLTMKDIINEAAREGHDLLFADNPSAVKKELMILIQNTIRSKWHEVLE

SEQ ID NO: 481 - DNA, 1038 bp, synthetic construct
  misc_feature 1..1038: note = Engineered RNA ligase variants
  source 1..1038: mol_type = other DNA
atggtacaccatcaccatcacggtggcagcggtatgtttgcctattattcaagtctggaaaaccattacaataataagttcattgagaagatccgtggtgcaggcttcgatatgagtaccgtggaatgggtagctcgcgagaagattcatggaacgaactttagcgttatcattactccgaccgaaatcgtcccagccaaacgcgacgggccgatcttggaaggcgagtcgttctttggtcacgaaattatcatgaaaaaatataaagactccttcgtgaaggtgcagaacatgctgaatgccatggatcttgttagcgtgcaaatctttggcgaatttgcgggtgggggcattacgaaaggcgtcgattacggagacaaagatttctatgtgtttgacatcctgtctgatagcgggaacgagaaagtttattgggatgactatcgcgtcgaatcgttttgcaccacgctcggtctgaaattagcgcctctgctgggacgtggtagtttcgctgaactgtcccagtacccaaacgatttcaaaagcattgtgaaacgttataatgaattggttgatacgacgggcctggaacatgccaataaacacgtctttggtccgcaagcgtcttctgaaactggcgtagcagaaggctacgttcttaaacccgtctatccgatcttctttaataatggtacacgcgtggcgattaaatgcaagaactccaaattttcggagaaagccaagagcgacaaaccaattaaagcgaaagtggaactgacggagaacgataaacgtgtgctcgaaatctttagcgagtatgttacctggaatcgcgtcagtaacgtactgtcacatattggctcagtgaccgcaaaagattttgggcgtgttatgggtctgacgatgaaagacatcattaatgaagcagcacgcgaaggccatgatctgttgttcgctgataacccgtcggcggtgaagaaagagctgaccattctcatccagaacacgattcgttccaaatggcacgaagttctggag

SEQ ID NO: 482 - protein, 346 aa, synthetic construct
  REGION 1..346: note = Engineered RNA ligase variants
MVHHHHHGGSGMFAYYSSLENHYNNKFIEKIRGAGFDMSTVEWVAREKIHGTNFSVIITPTEIVPAKRDGPILEGESFFGHEIIMKKYKDSFVKVQNMLNAMDLVSVQIFGEFAGGGITKGVDYGDKDFYVFDILSDSGNEKVYWDDYRVESFCTTLGLKLAPLLGRGSFAELSQYPNDFKSIVKRYNELVDTTGLEHANKHVFGPQASSETGVAEGYVLKPVYPIFFNNGTRVAIKCKNSKFSEKAKSDKPIKAKVELTENDKRVLEIFSEYVTWNRVSNVLSHIGSVTAKDFGRVMGLTMKDIINEAAREGHDLLFADNPSAVKKELTILIQNTIRSKWHEVLE

SEQ ID NO: 483 - DNA, 1038 bp, synthetic construct
  misc_feature 1..1038: note = Engineered RNA ligase variants
  source 1..1038: mol_type = other DNA
atgcatcaccatcaccatcacggtggcagcggtatgtttgcctattattcaagtctggaaaaccattacaataataagttcattgagaagatccgtggtgcaggcttcgatatgcacaccgtggaatgggtagctcgcgagaagattcatggaacgaactttagcgttatcattactccgaccgaaatcgtcccagccaaacgcgacgggccgatcttggaaggcgagtcgttctttggtcacgaaattatcatgaaaaaatataaagactccttcgtgaaggtgcagaacatgctgaatgccatggatcttgttagcgtgcaaatctttggcgaatttgcgggtggtggcattcagaaaggcgtcgattacggagacaaagatttctatgtgtttgacatcctgtctgatagcgggaacgagaaagtttactgggatgactatcgcgtcgaatcgttttgcaccacgctcggtctgaaattagcgcctctgctgggacgtggtagtttcgctgaactgtcccagtacccaaacgatttcaagagcattgtgaaccgttataatgaattggttgatacgacgggcctggaacatgccaataaacacgtctttggtccgcaagcgtcttctgaaatcggcgtagcagaaggctacgttcttaaacccgtctatccgatcttctttaataatggtacacgcgtggcgattaaatgcaagaactccaaattttcggagaaagccaagagcgacaaaccaattaaagcggcagtggaactgacggagaacgataaacgtgtgctcgaaatctttagcgagtatgttacctggaatcgcgtcagtaacgtactgtcacatattggctcagtgaccgcaaaagattttgggcgtgttatgggtctgacgatgaaagacatcattaatgaagcagcacgcgaaggccatgatatgttgttcgctgataacccgtcggcggtgaagaaagagctgatgattctcatccagaacacgattcgttccaaatggcacgaagttctggag

SEQ ID NO: 484 - protein, 346 aa, synthetic construct
  REGION 1..346: note = Engineered RNA ligase variants
MHHHHHHGGSGMFAYYSSLENHYNNKFIEKIRGAGFDMHTVEWVAREKIHGTNFSVIITPTEIVPAKRDGPILEGESFFGHEIIMKKYKDSFVKVQNMLNAMDLVSVQIFGEFAGGGIQKGVDYGDKDFYVFDILSDSGNEKVYWDDYRVESFCTTLGLKLAPLLGRGSFAELSQYPNDFKSIVNRYNELVDTTGLEHANKHVFGPQASSEIGVAEGYVLKPVYPIFFNNGTRVAIKCKNSKFSEKAKSDKPIKAAVELTENDKRVLEIFSEYVTWNRVSNVLSHIGSVTAKDFGRVMGLTMKDIINEAAREGHDMLFADNPSAVKKELMILIQNTIRSKWHEVLE

SEQ ID NO: 485 - DNA, 1038 bp, synthetic construct
  misc_feature 1..1038: note = Engineered RNA ligase variants
  source 1..1038: mol_type = other DNA
atgcatcaccatcaccatcacggtggcagcggtatgtttgcctattattcaagtctggaaaaccattacaataataagttcattgagaagatccgtggtgcaggcttcgatatgagtaccgtggaatgggtagctcgcgagaagattcatggaacgaactttagcgttatcattactccgaccgaaatcgtcccagccaaacgcacagggccgatcttggaaggcgagtcgttctttggtcacgaaattatcatgaaaaaatataaagactccttcgtgaaggtgcagaacatgctgaatgccatggatcttgttagcgtgcaaatctttggcgaatttgcgggtgggggcattacgaaaggcgtcgattacggagacaaagatttctatgtgtttgacatcctgtctgatagcgggaacgagaaagtttattgggatgactatcgcgtcgaatcgttttgcaccacgctcggtctgaaattagcgcctctgctgggacgtggtagtttcgctgaactgtcccagtacccaaacgatttcaaaagcattgtgaaccgttataatgaattggttgatacgacgggcctggaacatgccaataaacatgtctttggtccgcaagcgtcttctgaaactggcgtagcagaaggctacgttcttaaacccgtctatccgatcttctttaataatggtacacgcgtggcgattaaatgcaagaactccaaattttcggagaaagccaagagcgacaaaccaattaaagcggcagtggaactgacggagaacgataaacgtgtgctcgaaatctttagcgagtatgttacctggaatcgcgtcagtaacgtactgtcacatattggctcagtgaccgcaaaagattttgggcgtgttatgggtctgacgatgaaagacatcattaatgaagcagcacgcgaaggccatgatctgttgttcgctgataacccgtcggcggtgcgtaaagagctgatgattctcatccagaacacgattcgttccaaatggcacgaagttctggag

SEQ ID NO: 486 - protein, 346 aa, synthetic construct
  REGION 1..346: note = Engineered RNA ligase variants
MHHHHHHGGSGMFAYYSSLENHYNNKFIEKIRGAGFDMSTVEWVAREKIHGTNFSVIITPTEIVPAKRTGPILEGESFFGHEIIMKKYKDSFVKVQNMLNAMDLVSVQIFGEFAGGGITKGVDYGDKDFYVFDILSDSGNEKVYWDDYRVESFCTTLGLKLAPLLGRGSFAELSQYPNDFKSIVNRYNELVDTTGLEHANKHVFGPQASSETGVAEGYVLKPVYPIFFNNGTRVAIKCKNSKFSEKAKSDKPIKAAVELTENDKRVLEIFSEYVTWNRVSNVLSHIGSVTAKDFGRVMGLTMKDIINEAAREGHDLLFADNPSAVRKELMILIQNTIRSKWHEVLE

SEQ ID NO: 487 - DNA, 1038 bp, synthetic construct
  misc_feature 1..1038: note = Engineered RNA ligase variants
  source 1..1038: mol_type = other DNA
atgcatcaccatcaccatcacggtggcagcggtatgtttgcctattattcaagtctggaaaaccattacaataataagttcattgagaagatccgtggtgcaggcttcgatatgcacaccgtggaatgggtagctcgcgagaagattcatggaacgaactttagcgttatcattactccgaccgaaatcgtcccagccaaacgcgacgggccgatcttggaaggcgagtcgttctttggtcacgaaattatcatgaaaaaatataaagactccttcgtgaaggtgcagaacatgctgaatgccatggatcttgttagcgtgcaaatctttggcgaatttgcgggtaacggcattacgaaaggcgtcgattacggagacaaagatttctatgtgtttgacatcctgtctgatagcgggaacgagaaagtttactgggatgactatcgcgtcgaatcgttttgcaccacgctcggtctgaaattagcgcctctgctgggacgtggtagtttcgctgaactgtcccagtacccaaacgatttcaaaagcattgtgaaacgttataatgaattggttgatacgacgggcctggaacatgccaataaacacgtctttggtccgcaagcgtcttctgaaactggcgtagcagaaggctacgttcttaaacccgtctatccgatcttctttaataatggtacacgcgtggcgattaaatgcaagaactccaaattttcggagaaagccaagagcgacaaaccaattaaagcgaaagtggaactgacggagaacgataaacgtgtgctcgaaatctttagcgagtatgttacctggaatcgcgtcagtaacgtactgtcacatattggctcagtgaccgcaaaagattttgggcgtgttatgggtctgacgatgaaagacatcattaatgaagcagcacgcgaaggccatgatatgttgttcgctgataacccgtcggcggtgaagaaagagctgatgattctcatccagaacacgattcgttccaaatggcacgaagttctggag

SEQ ID NO: 488 - protein, 346 aa, synthetic construct
  REGION 1..346: note = Engineered RNA ligase variants
MHHHHHHGGSGMFAYYSSLENHYNNKFIEKIRGAGFDMHTVEWVAREKIHGTNFSVIITPTEIVPAKRDGPILEGESFFGHEIIMKKYKDSFVKVQNMLNAMDLVSVQIFGEFAGNGITKGVDYGDKDFYVFDILSDSGNEKVYWDDYRVESFCTTLGLKLAPLLGRGSFAELSQYPNDFKSIVKRYNELVDTTGLEHANKHVFGPQASSETGVAEGYVLKPVYPIFFNNGTRVAIKCKNSKFSEKAKSDKPIKAKVELTENDKRVLEIFSEYVTWNRVSNVLSHIGSVTAKDFGRVMGLTMKDIINEAAREGHDMLFADNPSAVKKELMILIQNTIRSKWHEVLE

SEQ ID NO: 489 - DNA, 1038 bp, synthetic construct
  misc_feature 1..1038: note = Engineered RNA ligase variants
  source 1..1038: mol_type = other DNA
atggaacaccatcaccatcacggtggcagcggtatgtttgcctattattcaagtctggaaaaccattacaataataagttcattgagaagatccgtggtgcaggcttcgatatgagtaccgtggaatgggtagctcgcgagaagattcatggaacgaactttagcgttatcattactccgaccgaaatcgtcccagccaaacgcacggggccgatcttggaaggcgagtcgttctttggtcacgaaattatcatgaaaaaatataaagactccttcgtgaaggtgcagaacatgctgaatgccatggatcttgttagcgtgcaaatctttggcgaatttgcgggtgggggcattacgaaaggcgtcgattacggagacaaagatttctatgtgtttgacatcctgtctgatagcgggaacgagaaagtttggtgggatgactatcgcgtcgaatcgttttgcaccaatctcggtttcaaattagcgcctctgctgggacgtggtagtttcgctgaactgtcccagtacccaaacgatttcaaaagcattgtgaaccgttataatgaattggttgatacgacgggcctggaacatgccaataaatatgtctttggtccgcaagcgtcttctgaaactggcgtagcagaaggctacgttcttaaacccgtctatccgatcttctttaataatggtacacgcgtggcgattaaatgcaagaactccaaattttcggagaaagccaagagcgacaaaccaattaaagcggcagtggaactgacggagaacgataaacgtgtgctcgaaatctttagcgagtatgttacctggaatcgcgtcagtaacgtactgtcacatattggctcagtgaccgcaaaagattttgggcgtgttatgggtctgacgatgaaagacatcattaatgaagcagcacgcgaaggccatgatctgttgttcgctgataacccgtcggcggtgcgtaaagagctgatgattctcatccagaacacgattcgttccaaatggcacgaagttctggag

SEQ ID NO: 490 - protein, 346 aa, synthetic construct
  REGION 1..346: note = Engineered RNA ligase variants
MEHHHHHGGSGMFAYYSSLENHYNNKFIEKIRGAGFDMSTVEWVAREKIHGTNFSVIITPTEIVPAKRTGPILEGESFFGHEIIMKKYKDSFVKVQNMLNAMDLVSVQIFGEFAGGGITKGVDYGDKDFYVFDILSDSGNEKVWWDDYRVESFCTNLGFKLAPLLGRGSFAELSQYPNDFKSIVNRYNELVDTTGLEHANKYVFGPQASSETGVAEGYVLKPVYPIFFNNGTRVAIKCKNSKFSEKAKSDKPIKAAVELTENDKRVLEIFSEYVTWNRVSNVLSHIGSVTAKDFGRVMGLTMKDIINEAAREGHDLLFADNPSAVRKELMILIQNTIRSKWHEVLE

SEQ ID NO: 491 - DNA, 1038 bp, synthetic construct
  misc_feature 1..1038: note = Engineered RNA ligase variants
  source 1..1038: mol_type = other DNA
atgcatcaccatcaccatcacggtggcagcggtatgtttgcgtattattcaagtctggaaaaccattacaataataagttcattgagaagatccgtggtgcaggcttcgatatgcataccgtggaatgggtagctcgcgagaagattcatggaacgaactttagcgttatcattactccgaccgaaattgtcccagccaaacgcacagggccgatcttggaaggcgagtcgttctttggttatgaaattatcatgaaaaaatataaagactccttcgtgaaggtgcagaacatgctgaatgccatggatcttgttagcgtgcaaatctttggcgaatttgcgggtggtggcattcagaaaggcgtcgattacggagacaaagatttctatgtgtttgacatcctgtctgatagcgggaacgagaaagtttactgggatgactatcgcgtcgaatcgttttgcaccaccctcggtctgaaattagcgcctctgctgggacgtggtagtttcgctgaactgtcccagtacccaaacgatttcaaaagcgtcgtgggccgttataatgaattggttgatacgacgggcctggaacatgccaataaacacgtctttggtccgcaagcgtcttctgaaactggcgtagcagaaggctacgttcttaaacccgtctatccgatcttctttaatgatggtacacgcgtggcgattaaatgcaagaactccaaattttcggagaaagccaagagcgacaaaccaattaaagcgaaagtggaactgacggagaacgataaacgtgtgctcgaaatctttagcgagtatgttacctggaatcgcgtcagtaacgtactgtcacatattggctcagtgaccgcaaaagattttgggcgtgttatgggtctgacgatgaaagacatcattaatgaagcagcacgcgaaggccatgatatgttgttcgctgataacccgtcggcggtgaagaaagagctgactattctcatccaaaacacgattcgttccaaatggcacgaagttctggag

SEQ ID NO: 492 - protein, 346 aa, synthetic construct
  REGION 1..346: note = Engineered RNA ligase variants
MHHHHHHGGSGMFAYYSSLENHYNNKFIEKIRGAGFDMHTVEWVAREKIHGTNFSVIITPTEIVPAKRTGPILEGESFFGYEIIMKKYKDSFVKVQNMLNAMDLVSVQIFGEFAGGGIQKGVDYGDKDFYVFDILSDSGNEKVYWDDYRVESFCTTLGLKLAPLLGRGSFAELSQYPNDFKSVVGRYNELVDTTGLEHANKHVFGPQASSETGVAEGYVLKPVYPIFFNDGTRVAIKCKNSKFSEKAKSDKPIKAKVELTENDKRVLEIFSEYVTWNRVSNVLSHIGSVTAKDFGRVMGLTMKDIINEAAREGHDMLFADNPSAVKKELTILIQNTIRSKWHEVLE

SEQ ID NO: 493 - DNA, 1038 bp, synthetic construct
  misc_feature 1..1038: note = Engineered RNA ligase variants
  source 1..1038: mol_type = other DNA
atggtacaccatcaccatcacggtggcagcggtatgtttgcgtattattcaagtctggaaaaccattacaataataagttcattgagaagatccgtggtgcaggcttcgatatgagtaccgtggaatgggtagctcgcgagaagattcatggaacgaactttagcgttatcattactccgaccgaaatcgtcccagccaaacgcgacgggccgatcttggaaggcgagtcgttctttggtcacgaaattatcatgaaaaaatataaagactccttcgtgaaggtgcagaacatgctgaatgccatggatcttgttagcgtgcaaatctttggcgaatttgcgggtaacggcattcaaaaaggcgtcgattacggagacaaagatttctatgtgtttgacatcctgtctgatagcgggaacgagaaagtttggtgggatgactatcgcgtcgaatcgttttgcaccctgctcggtctgaaattagcgcctctgctgggacgtggtagtttcgctgaactgtcccagtacccaaacgatttcaagagcattgtgaaacgttataatgaattggttgatacgacgggcctggaacatgccaataaacacgtctttggtccgcaagcgtcttctgaaactggcgtagcagaaggctacgttcttaaacccgtctatccgatcttctttaataatggtacacgcgtggcgattaaatgcaagaactccaaattttcggagaaagccaagagcgacaaaccaattaaagcgaaagtggaactgacggagaacgataaacgtgtgctcgaaatctttagcgagtatgttacctggaatcgcgtcagtaacgtactgtcacatattggctcagtgaccgcaaaagattttgggcgtgttatgggtctgacgatgaaagacatcattaatgaagcagcacgcgaaggccatgatatgttgttcgctgataacccgtcggcggtgaagaaagagctgaccattctcatccagaacacgattcgttccaaatggcacgaagttctggag

SEQ ID NO: 494 - protein, 346 aa, synthetic construct
  REGION 1..346: note = Engineered RNA ligase variants
MVHHHHHGGSGMFAYYSSLENHYNNKFIEKIRGAGFDMSTVEWVAREKIHGTNFSVIITPTEIVPAKRDGPILEGESFFGHEIIMKKYKDSFVKVQNMLNAMDLVSVQIFGEFAGNGIQKGVDYGDKDFYVFDILSDSGNEKVWWDDYRVESFCTLLGLKLAPLLGRGSFAELSQYPNDFKSIVKRYNELVDTTGLEHANKHVFGPQASSETGVAEGYVLKPVYPIFFNNGTRVAIKCKNSKFSEKAKSDKPIKAKVELTENDKRVLEIFSEYVTWNRVSNVLSHIGSVTAKDFGRVMGLTMKDIINEAAREGHDMLFADNPSAVKKELTILIQNTIRSKWHEVLE

SEQ ID NO: 495 - DNA, 1038 bp, synthetic construct
  misc_feature 1..1038: note = Engineered RNA ligase variants
  source 1..1038: mol_type = other DNA
atggaacaccatcaccatcacggtggcagcggtatgtttaagtattattcaagtctggaaaaccattacaataataagttcattgagaagatccgtggtgcaggcttcgatatgagtaccgtggaatgggtagctcgcgagaagattcatggaacgaactttagcgttatcattactccgaccgaaatcgtcccagccaaacgcgacgggccgatcttggaaggcgagtcgttctttggtcacgaaattatcatgaaaaaatataaagactccttcgtgaaggtgcagaacatgctgaatgccatggatcttgttagcgtgcaaatctttggcgaatttgcgggtaacggcattacgaaaggcgtcgattacggagacaaagatttctatgtgtttgacatcctgtctgatagcgggaacgagaaagtttactgggatgactatcgcgtcgaatcgttttgcaccactctcggtttcaaattagcgcctctgctgggacgtggtagtttcgctgaactgtcccagtacccaaacgatttcaagagcattgtgaaacgttataatgaattggttgatacgacgggcctggaacatgccaataaacatgtctttggtccgcaagcgtcttctgaaactggcgtagcagaaggctacgttcttaaacccgtctatccgatcttctttaataatggtacacgcgtggcgattaaatgcaagaactccaaattttcggagaaagccaagagcgacaaaccaattaaagcggcagtggaactgacggagaacgataaacgtgtgctcgaaatctttagcgagtatgttacctggaatcgcgtcagtaacgtactgtcacatattggctcagtgaccgcaaaagattttgggcgtgttatgggtctgacgatgaaagacatcattaatgaagcagcacgcgaaggccatgatatgttgttcgctgataacccgtcggcggtgcgtaaagagctgacgattctcatccagaacacgattcgttccaaatggcacgaagttctggag

SEQ ID NO: 496 - protein, 346 aa, synthetic construct
  REGION 1..346: note = Engineered RNA ligase variants
MEHHHHHGGSGMFKYYSSLENHYNNKFIEKIRGAGFDMSTVEWVAREKIHGTNFSVIITPTEIVPAKRDGPILEGESFFGHEIIMKKYKDSFVKVQNMLNAMDLVSVQIFGEFAGNGITKGVDYGDKDFYVFDILSDSGNEKVYWDDYRVESFCTTLGFKLAPLLGRGSFAELSQYPNDFKSIVKRYNELVDTTGLEHANKHVFGPQASSETGVAEGYVLKPVYPIFFNNGTRVAIKCKNSKFSEKAKSDKPIKAAVELTENDKRVLEIFSEYVTWNRVSNVLSHIGSVTAKDFGRVMGLTMKDIINEAAREGHDMLFADNPSAVRKELTILIQNTIRSKWHEVLE

SEQ ID NO: 497 - DNA, 1038 bp, synthetic construct
  misc_feature 1..1038: note = Engineered RNA ligase variants
  source 1..1038: mol_type = other DNA
atggaacaccatcaccatcacggtggcagcggtatgtttgcctattattcaagtctggaaaaccattacaataataagttcattgagaagatccgtggtgcaggcttcgatatgcacaccgtggaatgggtagctcgcgagaagattcatggaacgaactttagcgttatcattactccgaccgaaatcgtcccagccaaacgcacagggccgatcttggaaggcgagtcgttctttggtcacgaaattatcatgaaaaaatataaagactccttcgtgaaggtgcagaacatgctgaatgccatggatcttgttagcgtgcaaatctttggcgaatttgcgggtaacggcattacgaaaggcgtcgattacggagacaaagatttctatgtgtttgacatcctgtctgatagcgggaacgagaaagtttactgggatgactatcgcgtcgaatcgttttgcaccacgctcggtctgaaattagcgcctctgctgggacgtggtagtttcgctgaactgtcccagtacccaaacgatttcaaaagcattgtgaaccgttataatgaattggttgatacgacgggcctggaacatgccaataaacatgtctttggtccgcaagcgtcttctgaaactggcgtagcagaaggctacgttcttaaacccgtctatccgatcttctttaataatggtacacgcgtggcgattaaatgcaagaactccaaattttcggagaaagccaagagcgacaaaccaattaaagcgaaagtggaactgacggagaacgataaacgtgtgctcgaaatctttagcgagtatgttacctggaatcgcgtcagtaacgtactgtcacatattggctcagtgaccgcaaaagattttgggcgtgttatgggtctgacgatgaaagacatcattaatgaagcagcacgcgaaggccatgatctgttgttcgctgataacccgtcggcggtgaagaaagagctgaccattctcatccagaacacgattcgttccaaatggcacgaagttctggag

SEQ ID NO: 498 - protein, 346 aa, synthetic construct
  REGION 1..346: note = Engineered RNA ligase variants
MEHHHHHGGSGMFAYYSSLENHYNNKFIEKIRGAGFDMHTVEWVAREKIHGTNFSVIITPTEIVPAKRTGPILEGESFFGHEIIMKKYKDSFVKVQNMLNAMDLVSVQIFGEFAGNGITKGVDYGDKDFYVFDILSDSGNEKVYWDDYRVESFCTTLGLKLAPLLGRGSFAELSQYPNDFKSIVNRYNELVDTTGLEHANKHVFGPQASSETGVAEGYVLKPVYPIFFNNGTRVAIKCKNSKFSEKAKSDKPIKAKVELTENDKRVLEIFSEYVTWNRVSNVLSHIGSVTAKDFGRVMGLTMKDIINEAAREGHDLLFADNPSAVKKELTILIQNTIRSKWHEVLE

SEQ ID NO: 499 - DNA, 1038 bp, synthetic construct
  misc_feature 1..1038: note = Engineered RNA ligase variants
  source 1..1038: mol_type = other DNA
atgcatcaccatcaccatcacggtggcagcggtatgtttgcgtattattcaagtctggaaaaccattacaataataagttcattgagaagatccgtggtgcaggcttcgatatgcacaccgtggaatgggtagctcgcgagaagattcatggaacgaactttagcgttatcattactccgaccgaaatcgtcccagccaaacgcacggggccgatcttggaaggcgagtcgttctttggtcacgaaattatcatgaaaaaatataaagactccttcgtgaaggtgcagaacatgctgaatgccatggatcttgttagcgtgcaaatctttggcgaatttgcgggtaacggcattacgaaaggcgtcgattacggagacaaagatttctatgtgtttgacatcctgtctgatagcgggaacgagaaagtttggtgggatgactatcgcgtcgaatcgttttgcaccacgctcggtctgaaattagcgcctctgctgggacgtggtagtttcgctgaactgtcccagtacccaaacgatttcaagagcattgtgaaacgttataatgaattggttgatacgacgggcctggaacatgccaataaacacgtctttggtccgcaagcgtcttctgaaactggcgtagcagaaggctacgttcttaaacccgtctatccgatcttctttaataatggtacacgcgtggcgattaaatgcaagaactccaaattttcggagaaagccaagagcgacaaaccaattaaagcgaaagtggaactgacggagaacgataaacgtgtgctcgaaatctttagcgagtatgttacctggaatcgcgtcagtaacgtactgtcacatattggctcagtgaccgcaaaagattttgggcgtgttatgggtctgacgatgaaagacatcattaatgaagcagcacgcgaaggctgggatctgttgttcgctgataacccgtcggcggtgaagaaagagctgaccattctcatccagaacacgattcgttccaaatggcacgaagttctggag

SEQ ID NO: 500 - protein, 346 aa, synthetic construct
  REGION 1..346: note = Engineered RNA ligase variants
MHHHHHHGGSGMFAYYSSLENHYNNKFIEKIRGAGFDMHTVEWVAREKIHGTNFSVIITPTEIVPAKRTGPILEGESFFGHEIIMKKYKDSFVKVQNMLNAMDLVSVQIFGEFAGNGITKGVDYGDKDFYVFDILSDSGNEKVWWDDYRVESFCTTLGLKLAPLLGRGSFAELSQYPNDFKSIVKRYNELVDTTGLEHANKHVFGPQASSETGVAEGYVLKPVYPIFFNNGTRVAIKCKNSKFSEKAKSDKPIKAKVELTENDKRVLEIFSEYVTWNRVSNVLSHIGSVTAKDFGRVMGLTMKDIINEAAREGWDLLFADNPSAVKKELTILIQNTIRSKWHEVLE

SEQ ID NO: 501 - DNA, 1038 bp, synthetic construct
  misc_feature 1..1038: note = Engineered RNA ligase variants
  source 1..1038: mol_type = other DNA
atgcatcaccatcaccatcacggtggcagcggtatgtttgcctattattcaagtctggaaaaccattacaataataagttcattgagaagatccgtggtgcaggcttcgatatgagtaccgtggaatgggtagctcgcgagaagattcatggaacgaactttagcgttatcattactccgaccgaaatcgtcccagccaaacgcgacgggccgatcttggaaggcgagtcgttctttggtcacgaaattatcatgaaaaaatataaagactccttcgtgaaggtgcagaacatgctgaatgccatggatcttgttagcgtgcaaatctttggcgaatttgcgggtaacggcattcaaaaaggcgtcgattacggagacaaagatttctatgtgtttgacatcctgtctgatagcgggaacgagaaagtttggtgggatgactatcgcgtcgaatcgttttgcaccactctcggtctgaaattagcgcctctgctgggacgtggtagtttcgctgaactgtcccagtacccaaacgatttcgacagcattgtgaaacgttataatgaattggttgatacgacgggcctggaacatgccaataaacacgtctttggtccgcaagcgtcttctgaaactggcgtagcagaaggctacgttcttaaacccgtctatccgatcttctttaataatggtacacgcgtggcgattaaatgcaagaactccaaattttcggagaaagccaagagcgacaaaccaattaaagcggcagtggaactgacggagaacgataaacgtgtgctcgaaatctttagcgagtatgttacctggaatcgcgtcagtaacgtactgtcacatattggctcagtgaccgcaaaagattttgggcgtgttatgggtctgacgatgaaagacatcattaatgaagcagcacgcgaaggccatgatatgttgttcgctgataacccgtcggcggtgaagaaagagctgatgattctcatccagaacacgattcgttccaaatggcacgaagttctggag

SEQ ID NO: 502 - protein, 346 aa, synthetic construct
  REGION 1..346: note = Engineered RNA ligase variants
MHHHHHHGGSGMFAYYSSLENHYNNKFIEKIRGAGFDMSTVEWVAREKIHGTNFSVIITPTEIVPAKRDGPILEGESFFGHEIIMKKYKDSFVKVQNMLNAMDLVSVQIFGEFAGNGIQKGVDYGDKDFYVFDILSDSGNEKVWWDDYRVESFCTTLGLKLAPLLGRGSFAELSQYPNDFDSIVKRYNELVDTTGLEHANKHVFGPQASSETGVAEGYVLKPVYPIFFNNGTRVAIKCKNSKFSEKAKSDKPIKAAVELTENDKRVLEIFSEYVTWNRVSNVLSHIGSVTAKDFGRVMGLTMKDIINEAAREGHDMLFADNPSAVKKELMILIQNTIRSKWHEVLE

SEQ ID NO: 503 - DNA, 1038 bp, synthetic construct
  misc_feature 1..1038: note = Engineered RNA ligase variants
  source 1..1038: mol_type = other DNA
atggaacaccatcaccatcacggtggcagcggtatgtttgcctattattcaagtctggaaaaccattacaataataagttcattgagaagatccgtggtgcaggcttcgatatgagtaccgtggaatgggtagctcgcgagaagattcatggaacgaactttagcgttatcattactccgaccgaaatcgtcccagccaaacgcgacgggccgatcttggaaggcgagtcgttctttggtcacgaaattatcatgaaaaaatataaagactccttcgtgaaggtgcagaacatgctgaatgccatggatcttgttagcgtgcaaatctttggcgaatttgcgggtgggggcattacgaaaggcgtcgattacggagacaaagatttctatgtgtttgacatcctgtctgatagcgggaacgagaaagtttggtgggatgactatcgcgtcgaatcgttttgcaccctgctcggtctgaaattagcgcctctgctgggacgtggtagtttcgctgaactgtcccagtacccaaacgatttcaagagcattgtgaaacgttataatgaattggttgatacgacgggcctggaacatgccaataaacacgtctttggtccgcaagcgtcttctgaaactggcgtagcagaaggctacgttcttaaacccgtctatccgatcttctttaataatggtacacgcgtggcgattaaatgcaagaactccaaattttcggagaaagccaagagcgacaaaccaattaaagcgaaagtggaactgacggagaacgataaacgtgtgctcgaaatctttagcgagtatgttacctggaatcgcgtcagtaacgtactgtcacatattggctcagtgaccgcaaaagattttgggcgtgttatgggtctgacgatgaaagacatcattaatgaagcagcacgcgaaggctgggatatgttgttcgctgataacccgtcggcggtgaagaaagagctgaccattctcatccagaacacgattcgttccaaatggcacgaagttctggag

SEQ ID NO: 504 - protein, 346 aa, synthetic construct
  REGION 1..346: note = Engineered RNA ligase variants
MEHHHHHGGSGMFAYYSSLENHYNNKFIEKIRGAGFDMSTVEWVAREKIHGTNFSVIITPTEIVPAKRDGPILEGESFFGHEIIMKKYKDSFVKVQNMLNAMDLVSVQIFGEFAGGGITKGVDYGDKDFYVFDILSDSGNEKVWWDDYRVESFCTLLGLKLAPLLGRGSFAELSQYPNDFKSIVKRYNELVDTTGLEHANKHVFGPQASSETGVAEGYVLKPVYPIFFNNGTRVAIKCKNSKFSEKAKSDKPIKAKVELTENDKRVLEIFSEYVTWNRVSNVLSHIGSVTAKDFGRVMGLTMKDIINEAAREGWDMLFADNPSAVKKELTILIQNTIRSKWHEVLE

SEQ ID NO: 505 - DNA, 1038 bp, synthetic construct
  misc_feature 1..1038: note = Engineered RNA ligase variants
  source 1..1038: mol_type = other DNA
atgcatcaccatcaccatcacggtggcagcggtatgtttaagtattattcaagtctggaaaaccattacaataataagttcattgagaagatccgtggtgcaggcttcgatatgagtaccgtggaatgggtagctcgcgagaagattcatggaacgaactttagcgttatcattactccgaccgaaatcgtcccagccaaacgcgacgggccgatcttggaaggcgagtcgttctttggtcacgaaattatcatgaaaaaatataaagactccttcgtgaaggtgcagaacatgctgaatgccatggatcttgttagcgtgcaaatctttggcgaatttgcgggtggtggcattcagaaaggcgtcgattacggagacaaagatttctatgtgtttgacatcctgtctgatagcgggaacgagaaagtttggtgggatgactatcgcgtcgaatcgttttgcaccaatctcggtctgaaattagcgcctctgctgggacgtggtagtttcgctgaactgtcccagtacccaaacgatttcaaaagcattgtgaaccgttataatgaattggttgatacgacgggcctggaacatgccaataaacatgtctttggtccgcaagcgtcttctgaaatcggcgtagcagaaggctacgttcttaaacccgtctatccgatcttctttaataatggtacacgcgtggcgattaaatgcaagaactccaaattttcggagaaagccaagagcgacaaaccaattaaagcggcagtggaactgacggagaacgataaacgtgtgctcgaaatctttagcgagtatgttacctggaatcgcgtcagtaacgtactgtcacatattggctcagtgaccgcaaaagattttgggcgtgttatgggtctgacgatgaaagacatcattaatgaagcagcacgcgaaggctgggatctgttgttcgctgataacccgtcggcggtgcgtaaagagctgatgattctcatccagaacacgattcgttccaaatggcacgaagttctggag

SEQ ID NO: 506 - protein, 346 aa, synthetic construct
  REGION 1..346: note = Engineered RNA ligase variants
MHHHHHHGGSGMFKYYSSLENHYNNKFIEKIRGAGFDMSTVEWVAREKIHGTNFSVIITPTEIVPAKRDGPILEGESFFGHEIIMKKYKDSFVKVQNMLNAMDLVSVQIFGEFAGGGIQKGVDYGDKDFYVFDILSDSGNEKVWWDDYRVESFCTNLGLKLAPLLGRGSFAELSQYPNDFKSIVNRYNELVDTTGLEHANKHVFGPQASSEIGVAEGYVLKPVYPIFFNNGTRVAIKCKNSKFSEKAKSDKPIKAAVELTENDKRVLEIFSEYVTWNRVSNVLSHIGSVTAKDFGRVMGLTMKDIINEAAREGWDLLFADNPSAVRKELMILIQNTIRSKWHEVLE

SEQ ID NO: 507 - DNA, 1038 bp, synthetic construct
  misc_feature 1..1038: note = Engineered RNA ligase variants
  source 1..1038: mol_type = other DNA
atgcaccaccatcaccatcacggtggcagcggtatgtttgcctattattcaagtctggaaaaccattacaataataagttcattgagaagatccgtggtgcaggcttcgatatgagtaccgtggaatgggtagctcgcgagaagattcatggaacgaactttagcgttatcattactccgaccgaaatcgtcccagccaaacgcgacgggccgatcttggaaggcgagtcgttctttggtcacgaaattatcatgaaaaaatataaagactccttcgtgaaggtgcagaacatgctgaatgccatggatcttgttagcgtgcaaatctttggcgaatttgcgggtggtggcattcagaaaggcgtcgattacggagacaaagatttctatgtgtttgacatcctgtctgatagcgggaacgagaaagtttggtgggatgactatcgcgtcgaatcgttttgcaccctgctcggtctgaaattagcgcctctgctgggacgtggtagtttcgctgaactgtcccagtacccaaacgatttcaaaagcattgtgaaacgttataatgaattggttgatacgacgggcctggaacatgccaataaacacgtctttggtccgcaagcgtcttctgaaactggcgtagcagaaggctacgttcttaaacccgtctatccgatcttctttaataatggtacacgcgtggcgattaaatgcaagaactccaaattttcggagaaagccaagagcgacaaaccaattaaagcgaaagtggaactgacggagaacgataaacgtgtgctcgaaatctttagcgagtatgttacctggaatcgcgtcagtaacgtactgtcacatattggctcagtgaccgcaaaagattttgggcgtgttatgggtctgacgatgaaagacatcattaatgaagcagcacgcgaaggccatgatctgttgttcgctgataacccgtcggcggtgaagaaagagctgatgattctcatccagaacacgattcgttccaaatggcacgaagttctggag

SEQ ID NO: 508 - protein, 346 aa, synthetic construct
  REGION 1..346: note = Engineered RNA ligase variants
MHHHHHHGGSGMFAYYSSLENHYNNKFIEKIRGAGFDMSTVEWVAREKIHGTNFSVIITPTEIVPAKRDGPILEGESFFGHEIIMKKYKDSFVKVQNMLNAMDLVSVQIFGEFAGGGIQKGVDYGDKDFYVFDILSDSGNEKVWWDDYRVESFCTLLGLKLAPLLGRGSFAELSQYPNDFKSIVKRYNELVDTTGLEHANKHVFGPQASSETGVAEGYVLKPVYPIFFNNGTRVAIKCKNSKFSEKAKSDKPIKAKVELTENDKRVLEIFSEYVTWNRVSNVLSHIGSVTAKDFGRVMGLTMKDIINEAAREGHDLLFADNPSAVKKELMILIQNTIRSKWHEVLE

SEQ ID NO: 509 - DNA, 1038 bp, synthetic construct
  misc_feature 1..1038: note = Engineered RNA ligase variants
  source 1..1038: mol_type = other DNA
atgcatcaccatcaccatcacggtggcagcggtatgtttgcgtattattcaagtctggaaaaccattacaataataagttcattgagaagatccgtggtgcaggcttcgatatgcacaccgtggaatgggtagctcgcgagaagattcatggaacgaactttagcgttatcattactccgaccgaaatcgtcccagccaaacgcacagggccgatcttggaaggcgagtcgttctttggtcacgaaattatcatgaaaaaatataaagactccttcgtgaaggtgcagaacatgctgaatgccatggatcttgttagcgtgcaaatctttggcgaatttgcgggtggtggcattcagaaaggcgtcgattacggagacaaagatttctatgtgtttgacatcctgtctgatagcgggaacgagaaagtttactgggatgactatcgcgtcgaatcgttttgcacccaactcggtctgaaattagcgcctctgctgggacgtggtagtttcgctgaactgtcccagtacccaaacgatttcaaaagcatcgtgggccgttataatgaattggttgatacgacgggcctggaacatgccaataaacacgtctttggtccgcaagcgtcttctgaaactggcgtagcagaaggctacgttcttaaacccgtctatccgatcttctttaataatggtacacgcgtggcgattaaatgcaagaactccaaattttcggagaaagccaagagcgacaaaccaattaaagcgaaagtggaactgacggagaacgataaacgtgtgctcgaaatctttagcgagtatgttacctggaatcgcgtcagtaacgtactgtcacatattggctcagtgaccgcaaaagattttgggcgtgttatgggtctgacgatgaaagacatcattaatgaagcagcacgcgaaggccatgatatgttgttcgctgataacccgtcggcggtgaagaaagagctgactattctcatccgccacacgattcgttccaaatggcacgaagttctggag

SEQ ID NO: 510 - protein, 346 aa, synthetic construct
  REGION 1..346: note = Engineered RNA ligase variants
MHHHHHHGGSGMFAYYSSLENHYNNKFIEKIRGAGFDMHTVEWVAREKIHGTNFSVIITPTEIVPAKRTGPILEGESFFGHEIIMKKYKDSFVKVQNMLNAMDLVSVQIFGEFAGGGIQKGVDYGDKDFYVFDILSDSGNEKVYWDDYRVESFCTQLGLKLAPLLGRGSFAELSQYPNDFKSIVGRYNELVDTTGLEHANKHVFGPQASSETGVAEGYVLKPVYPIFFNNGTRVAIKCKNSKFSEKAKSDKPIKAKVELTENDKRVLEIFSEYVTWNRVSNVLSHIGSVTAKDFGRVMGLTMKDIINEAAREGHDMLFADNPSAVKKELTILIRHTIRSKWHEVLE

SEQ ID NO: 511 - DNA, 1038 bp, synthetic construct
  misc_feature 1..1038: note = Engineered RNA ligase variants
  source 1..1038: mol_type = other DNA
atgcatcaccatcaccatcacggtggcagcggtatgtttgcgtattattcaagtctggaaaaccattacaataataagttcattgagaagatccgtggtgcaggcttcgatatgcagaccgtggaatgggtagctcgcgagaagattcatggaacgaactttagcgttatcattactccgaccgaagttgtcccagccaaacgcacagggccgatcttggaaggcgagtcgttctttggtcatgaaattatcatgaaaaaatataaagactccttcgtgaaggtgcagaacatgctgaatgccatggatcttgttagcgtgcaaatctttggcgaatttgcgggtggtggcattcagaaaggcgtcgattacggagacaaagatttctatgtgtttgacatcctgtctgatagcgggaacgagaaagtttactgggatgactatcgcgtcgaatcgttttgcacccaactcggtctgaaattagcgcctctgctgggacgtggtagtttcgctgaactgtcccagtacccaaacgatttcaaaagcatcgtgaaccgttataatgaattggttgatacgacgggcctggaacatgccaataaacacgtctttggtccgcaagcgtcttctgaaactggcgtagcagaaggctacgttcttaaacccgtctatccgatcttctttaatgatggtacacgcgtggcgattaaatgcaagaactccaaattttcggagaaagccaagagcgacaaaccaattaaagcgaaactggaactgacggagaacgataaacgtgtgctcgaaatctttagcgagtatgttaattggaatcgcgtcagtaacgtactgtcacatattggctcagtgaccgcaaaagattttgggcgtgttatgggtctgacgatgaaagacatcattaatgaagcagcacgcgaaggccatgatatgttgttcgctgataacccgtcggcggtgaagaaagagctgcgtattctcatccaacacacgattcgttccaaatggcacgaagttctggag

SEQ ID NO: 512 - protein, 346 aa, synthetic construct
  REGION 1..346: note = Engineered RNA ligase variants
MHHHHHHGGSGMFAYYSSLENHYNNKFIEKIRGAGFDMQTVEWVAREKIHGTNFSVIITPTEVVPAKRTGPILEGESFFGHEIIMKKYKDSFVKVQNMLNAMDLVSVQIFGEFAGGGIQKGVDYGDKDFYVFDILSDSGNEKVYWDDYRVESFCTQLGLKLAPLLGRGSFAELSQYPNDFKSIVNRYNELVDTTGLEHANKHVFGPQASSETGVAEGYVLKPVYPIFFNDGTRVAIKCKNSKFSEKAKSDKPIKAKLELTENDKRVLEIFSEYVNWNRVSNVLSHIGSVTAKDFGRVMGLTMKDIINEAAREGHDMLFADNPSAVKKELRILIQHTIRSKWHEVLE

SEQ ID NO: 513 - DNA, 1038 bp, synthetic construct
  misc_feature 1..1038: note = Engineered RNA ligase variants
  source 1..1038: mol_type = other DNA
atgcatcaccatcaccatcacggtggcagcggtatgtttgcgtattattcaagtctggaaaaccattacaataataagttcattgagaagatccgtggtgcaggcttcgatatgcataccgtggaatgggtagctcgcgagaagattcatggaacgaactttagcgttatcattactccgaccgaaatcgtcccagccaaacgcacagggccgatcttggaaggcgagtcgttctttggtcacgaaattatcatgaaaaaatataaagactccttcgtgaaggtgcagaacatgctgaatgccatggatcttgttagcgtgcaaatctttggcgaatttgcgggtggtggcattcagaaaggcgtcgattacggagacaaagatttctatgtgtttgacatcctgtctgatagcgggaacgagaaagtttactgggatgactatcgcgtcgaatcgttttgcacccaactcggtctgaaattagcgcctctgctgggacgtggtagtttcgctgaactgtcccagtacccaaacgatttcaaaagcattgtgaaccgttataatgaattggttgatacgacgggcctggaacatgccaataaacacgtctttggtccgcaagcgtcttctgaaactggcgtagcagaaggctacgttcttaaacccgtctatccgatcttctttaataatggtacacgcgtggcgattaaatgcaagaactccaaattttcggagaaagccaagagcgacaaaccaattaaagcgaaagtggaactgacggagaacgataaacgtctgctcgaaatctttagcgagtatgttacctggaatcgcgtcagtaacgtactgtcacatattggctcagtgaccgcaaaagattttgggcgtgttatgggtctgacgatgaaagacatcattaatgaagcagcacgcgaaggccatgatctgttgttcgctgataacccgtcggcggtgaagaaagagctgcgtattctcatccgccacacgattcgttccaaatggcacgaagttctggag

SEQ ID NO: 514 - protein, 346 aa, synthetic construct
  REGION 1..346: note = Engineered RNA ligase variants
MHHHHHHGGSGMFAYYSSLENHYNNKFIEKIRGAGFDMHTVEWVAREKIHGTNFSVIITPTEIVPAKRTGPILEGESFFGHEIIMKKYKDSFVKVQNMLNAMDLVSVQIFGEFAGGGIQKGVDYGDKDFYVFDILSDSGNEKVYWDDYRVESFCTQLGLKLAPLLGRGSFAELSQYPNDFKSIVNRYNELVDTTGLEHANKHVFGPQASSETGVAEGYVLKPVYPIFFNNGTRVAIKCKNSKFSEKAKSDKPIKAKVELTENDKRLLEIFSEYVTWNRVSNVLSHIGSVTAKDFGRVMGLTMKDIINEAAREGHDLLFADNPSAVKKELRILIRHTIRSKWHEVLE

SEQ ID NO: 515 - DNA, 1038 bp, synthetic construct
  misc_feature 1..1038: note = Engineered RNA ligase variants
  source 1..1038: mol_type = other DNA
atgcatcaccatcaccatcacggtggcagcggtatgtttgcgtattattcaagtctggaaaaccattacaataataagttcattgagaagatccgtggtgcaggcttcgatatgcagaccgtggaatgggtagctcgcgagaagattcatggaacgaactttagcgttatcattactccgaccgaagttgtcccagccaaacgcacagggccgatcttggaaggcgagtcgttctttggtcatgaaattatcatgaaaaaatataaagactccttcgtgaaggtgcagaacatgctgaatgccatggatcttgttagcgtgcaaatctttggcgaatttgcgggtggtggcattcagaaaggcgtcgattacggagacaaagatttctatgtgtttgacatcctgtctgatagcgggaacgagaaagtttactgggatgactatcgcgtcgaatcgttttgcacccaactcggtctgaaattagcgcctctgctgggacgtggtagtttcgctgaactgtcccagtacccaaacgatttcaaaagcgtcgtgggccgttataatgaattggttgatacgacgggcctggaacatgccaataaacacgtctttggtccgcaagcgtcttctgaaactggcgtagcagaaggctacgttcttaaacccgtctatccgatcttctttaatgatggtacacgcgtggcgattaaatgcaagaactccaaattttcggagaaagccaagagcgacaaaccaattaaagcgaaagtggaactgacggagaacgataaacgtgtgctcgaaatctttagcgagtatgttacctggaatcgcgtcagtaacgtactgtcacatattggctcagtgaccgcaaaagattttgggcgtgttatgggtctgacgatgaaagacatcattaatgaagcagcacgcgaaggccatgatatgttgttcgctgataacccgtcggcggtgaagaaagagctgcgtattctcatccgcaacacgattcgttccaaatggcacgaagttctggag

SEQ ID NO: 516 - protein, 346 aa, synthetic construct
  REGION 1..346: note = Engineered RNA ligase variants
MHHHHHHGGSGMFAYYSSLENHYNNKFIEKIRGAGFDMQTVEWVAREKIHGTNFSVIITPTEVVPAKRTGPILEGESFFGHEIIMKKYKDSFVKVQNMLNAMDLVSVQIFGEFAGGGIQKGVDYGDKDFYVFDILSDSGNEKVYWDDYRVESFCTQLGLKLAPLLGRGSFAELSQYPNDFKSVVGRYNELVDTTGLEHANKHVFGPQASSETGVAEGYVLKPVYPIFFNDGTRVAIKCKNSKFSEKAKSDKPIKAKVELTENDKRVLEIFSEYVTWNRVSNVLSHIGSVTAKDFGRVMGLTMKDIINEAAREGHDMLFADNPSAVKKELRILIRNTIRSKWHEVLE

SEQ ID NO: 517 - DNA, 1038 bp, synthetic construct
  misc_feature 1..1038: note = Engineered RNA ligase variants
  source 1..1038: mol_type = other DNA
atgcaccaccatcaccatcacggtggcagcggtatgtttgcctattattcaagtctggaaaaccattacaataataagttcattgagaagatccgtggtgcaggcttcgatatgcacaccgtggaatgggtagctcgcgagaagattcatggaacgaactttagcgttatcattactccgaccgaaatcgtcccagccaaacgcgacgggccgatcttggaaggcgagtcgttctttggtcacgaaattatcatgaaaaaatataaagactccttcgtgaaggtgcagaacatgctgaatgccatggatcttgttagcgtgcaaatctttggcgaatttgcgggtggtggcattcagaaaggcgtcgattacggagacaaagatttctatgtgtttgacatcctgtctgatagcgggaacgagaaagtttggtgggatgactatcgcgtcgaatcgttttgcaccacgctcggtctgaaattagcgcctctgctgggacgtggtagtttcgctgaactgtcccagtacccaaacgatttcaagagcattgtgaaccgttataatgaattggttgatacgacgggcctggaacatgccaataaacatgtctttggtccgcaagcgtcttctgaaactggcgtagcagaaggctacgttcttaaacccgtctatccgatcttctttaataatggtacacgcgtggcgattaaatgcaagaactccaaattttcggagaaagccaagagcgacaaaccaattaaagcgaaagtggaactgacggagaacgataaacgtgtgctcgaaatctttagcgagtatgttacctggaatcgcgtcagtaacgtactgtcacatattggctcagtgaccgcaaaagattttgggcgtgttatgggtctgacgatgaaagacatcattaatgaagcagcacgcgaaggccatgatctgttgttcgctgataacccgtcggcggtgaagaaagagctgaccattctcatccagaacacgattcgttccaaatggcacgaagttctggag

SEQ ID NO: 518 - protein, 346 aa, synthetic construct
  REGION 1..346: note = Engineered RNA ligase variants
MHHHHHHGGSGMFAYYSSLENHYNNKFIEKIRGAGFDMHTVEWVAREKIHGTNFSVIITPTEIVPAKRDGPILEGESFFGHEIIMKKYKDSFVKVQNMLNAMDLVSVQIFGEFAGGGIQKGVDYGDKDFYVFDILSDSGNEKVWWDDYRVESFCTTLGLKLAPLLGRGSFAELSQYPNDFKSIVNRYNELVDTTGLEHANKHVFGPQASSETGVAEGYVLKPVYPIFFNNGTRVAIKCKNSKFSEKAKSDKPIKAKVELTENDKRVLEIFSEYVTWNRVSNVLSHIGSVTAKDFGRVMGLTMKDIINEAAREGHDLLFADNPSAVKKELTILIQNTIRSKWHEVLE

SEQ ID NO: 519 - DNA, 1038 bp, synthetic construct
  misc_feature 1..1038: note = Engineered RNA ligase variants
  source 1..1038: mol_type = other DNA
atgcatcaccatcaccatcacggtggcagcggtatgtttgcctattattcaagtctggaaaaccattacaataataagttcattgagaagatccgtggtgcaggcttcgatatgcacaccgtggaatgggtagctcgcgagaagattcatggaacgaactttagcgttatcattactccgaccgaaatcgtcccagccaaacgcacggggccgatcttggaaggcgagtcgttctttggtcacgaaattatcatgaaaaaatataaagactccttcgtgaaggtgcagaacatgctgaatgccatggatcttgttagcgtgcaaatctttggcgaatttgcgggtaacggcattacaaaaggcgtcgattacggagacaaagatttctatgtgtttgacatcctgtctgatagcgggaacgagaaagtttactgggatgactatcgcgtcgaatcgttttgcaccctgctcggtctgaaattagcgcctctgctgggacgtggtagtttcgctgaactgtcccagtacccaaacgatttcaaaagcattgtgaaccgttataatgaattggttgatacgacgggcctggaacatgccaataaatatgtctttggtccgcaagcgtcttctgaaatcggcgtagcagaaggctacgttcttaaacccgtctatccgatcttctttaataatggtacacgcgtggcgattaaatgcaagaactccaaattttcggagaaagccaagagcgacaaaccaattaaagcgaaagtggaactgacggagaacgataaacgtgtgctcgaaatctttagcgagtatgttacctggaatcgcgtcagtaacgtactgtcacatattggctcagtgaccgcaaaagattttgggcgtgttatgggtctgacgatgaaagacatcattaatgaagcagcacgcgaaggccatgatatgttgttcgctgataacccgtcggcggtgcgtaaagagctgatgattctcatccagaacacgattcgttccaaatggcacgaagttctggag

SEQ ID NO: 520 - protein, 346 aa, synthetic construct
  REGION 1..346: note = Engineered RNA ligase variants
MHHHHHHGGSGMFAYYSSLENHYNNKFIEKIRGAGFDMHTVEWVAREKIHGTNFSVIITPTEIVPAKRTGPILEGESFFGHEIIMKKYKDSFVKVQNMLNAMDLVSVQIFGEFAGNGITKGVDYGDKDFYVFDILSDSGNEKVYWDDYRVESFCTLLGLKLAPLLGRGSFAELSQYPNDFKSIVNRYNELVDTTGLEHANKYVFGPQASSEIGVAEGYVLKPVYPIFFNNGTRVAIKCKNSKFSEKAKSDKPIKAKVELTENDKRVLEIFSEYVTWNRVSNVLSHIGSVTAKDFGRVMGLTMKDIINEAAREGHDMLFADNPSAVRKELMILIQNTIRSKWHEVLE

SEQ ID NO: 521 - DNA, 1038 bp, synthetic construct
  misc_feature 1..1038: note = Engineered RNA ligase variants
  source 1..1038: mol_type = other DNA
atgcatcaccatcaccatcacggtggcagcggtatgtttgcctattattcaagtctggaaaaccattacaataataagttcattgagaagatccgtggtgcaggcttcgatatgagtaccgtggaatgggtagctcgcgagaagattcatggaacgaactttagcgttatcattactccgaccgaaatcgtcccagccaaacgcgacgggccgatcttggaaggcgagtcgttctttggtcacgaaattatcatgaaaaaatataaagactccttcgtgaaggtgcagaacatgctgaatgccatggatcttgttagcgtgcaaatctttggcgaatttgcgggtgggggcattacgaaaggcgtcgattacggagacaaagatttctatgtgtttgacatcctgtctgatcgcgggaacgagaaagtttactgggatgactatcgcgtcgaatcgttttgcaccacgctcggtctgaaattagcgcctctgctgggacgtggtagtttcgctgaactgtcccagtacccaaacgatttcgacagcattgtgaaacgttataatgaattggttgatacgacgggcctggaacatgccaataaacatgtctttggtccgcaagcgtcttctgaaactggcgtagcagaaggctacgttcttaaacccgtctatccgatcttctttaataatggtacacgcgtggcgattaaatgcaagaactccaaattttcggagaaagccaagagcgacaaaccaattaaagcgaaagtggaactgacggagaacgataaacgtgtgctcgaaatctttagcgagtatgttacctggaatcgcgtcagtaacgtactgtcacatattggctcagtgaccgcaaaagattttgggcgtgttatgggtctgacgatgaaagacatcattaatgaagcagcacgcgaaggccatgatctgttgttcgctgataacccgtcggcggtgcgtaaagagctgacgattctcatccagaacacgattcgttccaaatggcacgaagttctggag

SEQ ID NO: 522 - protein, 346 aa, synthetic construct
  REGION 1..346: note = Engineered RNA ligase variants
MHHHHHHGGSGMFAYYSSLENHYNNKFIEKIRGAGFDMSTVEWVAREKIHGTNFSVIITPTEIVPAKRDGPILEGESFFGHEIIMKKYKDSFVKVQNMLNAMDLVSVQIFGEFAGGGITKGVDYGDKDFYVFDILSDRGNEKVYWDDYRVESFCTTLGLKLAPLLGRGSFAELSQYPNDFDSIVKRYNELVDTTGLEHANKHVFGPQASSETGVAEGYVLKPVYPIFFNNGTRVAIKCKNSKFSEKAKSDKPIKAKVELTENDKRVLEIFSEYVTWNRVSNVLSHIGSVTAKDFGRVMGLTMKDIINEAAREGHDLLFADNPSAVRKELTILIQNTIRSKWHEVLE

SEQ ID NO: 523 - DNA, 1038 bp, synthetic construct
  misc_feature 1..1038: note = Engineered RNA ligase variants
  source 1..1038: mol_type = other DNA
atgcatcaccatcaccatcacggtggcagcggtatgtttgcgtattattcaagtctggaaaaccattacaataataagttcattgagaagatccgtggtgcaggcttcgatatgcagaccgtggaatgggtagctcgcgagaagattcatggaacgaactttagcgttatcattactccgaccgaaattgtcccagccaaacgcacagggccgatcttggaaggcgagtcgttctttggttatgaaattatcatgaaaaaatataaagactccttcgtgaaggtgcagaacatgctgaatgccatggatcttgttagcgtgcaaatctttggcgaatttgcgggtggtggcattcagaaaggcgtcgattacggagacaaagatttctatgtgtttgacatcctgtctgatagcgggaacgagaaagtttactgggatgactatcgcgtcgaatcgttttgcacccaactcggtctgaaattagcgcctctgctgggacgtggtagtttcgctgaactgtcccagtacccaaacgatttcaaaagcattgtgaaccgttataatgaattggttgatacgacgggcctggaacatgccaataaacacgtctttggtccgcaagcgtcttctgaaactggcgtagcagaaggctacgttcttaaacccgtctatccgatcttctttaatgatggtacacgcgtggcgattaaatgcaagaactccaaattttcggagaaagccaagagcgacaaaccaattaaagcgaaagtggaactgacggagaacgataaacgtgtgctcgaaatctttagcgagtatgttacttggaatcgcgtcagtaacgtactgtcacatattggctcagtgaccgcaaaagattttgggcgtgttatgggtctgacgatgaaagacatcattaatgaagcagcacgcgaaggccatgatatgttgttcgctgataacccgtcggcggtgaagaaagagctgaccattctcatccagaacacgattcgttccaaatggcacgaagttctggag

SEQ ID NO: 524 - protein, 346 aa, synthetic construct
  REGION 1..346: note = Engineered RNA ligase variants
MHHHHHHGGSGMFAYYSSLENHYNNKFIEKIRGAGFDMQTVEWVAREKIHGTNFSVIITPTEIVPAKRTGPILEGESFFGYEIIMKKYKDSFVKVQNMLNAMDLVSVQIFGEFAGGGIQKGVDYGDKDFYVFDILSDSGNEKVYWDDYRVESFCTQLGLKLAPLLGRGSFAELSQYPNDFKSIVNRYNELVDTTGLEHANKHVFGPQASSETGVAEGYVLKPVYPIFFNDGTRVAIKCKNSKFSEKAKSDKPIKAKVELTENDKRVLEIFSEYVTWNRVSNVLSHIGSVTAKDFGRVMGLTMKDIINEAAREGHDMLFADNPSAVKKELTILIQNTIRSKWHEVLE

SEQ ID NO: 525 - DNA, 1038 bp, synthetic construct
  misc_feature 1..1038: note = Engineered RNA ligase variants
  source 1..1038: mol_type = other DNA
atggtacaccatcaccatcacggtggcagcggtatgtttaagtattattcaagtctggaaaaccattacaataataagttcattgagaagatccgtggtgcaggcttcgatatgcacaccgtggaatgggtagctcgcgagaagattcatggaacgaactttagcgttatcattactccgaccgaaatcgtcccagccaaacgcgacgggccgatcttggaaggcgagtcgttctttggtcacgaaattatcatgaaaaaatataaagactccttcgtgaaggtgcagaacatgctgaatgccatggatcttgttagcgtgcaaatctttggcgaatttgcgggtaacggcattacgaaaggcgtcgattacggagacaaagatttctatgtgtttgacatcctgtctgatagcgggaacgagaaagtttggtgggatgactatcgcgtcgaatcgttttgcaccactctcggtttcaaattagcgcctctgctgggacgtggtagtttcgctgaactgtcccagtacccaaacgatttcaaaagcattgtgaaccgttataatgaattggttgatacgacgggcctggaacatgccaataaacacgtctttggtccgcaagcgtcttctgaaaccggcgtagcagaaggctacgttcttaaacccgtctatccgatcttctttaataatggtacacgcgtggcgattaaatgcaagaactccaaattttcggagaaagccaagagcgacaaaccaattaaagcgaaagtggaactgacggagaacgataaacgtgtgctcgaaatctttagcgagtatgttacctggaatcgcgtcagtaacgtactgtcacatattggctcagtgaccgcaaaagattttgggcgtgttatgggtctgacgatgaaagacatcattaatgaagcagcacgcgaaggccatgatatgttgttcgctgataacccgtcggcggtgcgtaaagagctgatgattctcatccagaacacgattcgttccaaatggcacgaagttctggag

SEQ ID NO: 526 - protein, 346 aa, synthetic construct
  REGION 1..346: note = Engineered RNA ligase variants
MVHHHHHGGSGMFKYYSSLENHYNNKFIEKIRGAGFDMHTVEWVAREKIHGTNFSVIITPTEIVPAKRDGPILEGESFFGHEIIMKKYKDSFVKVQNMLNAMDLVSVQIFGEFAGNGITKGVDYGDKDFYVFDILSDSGNEKVWWDDYRVESFCTTLGFKLAPLLGRGSFAELSQYPNDFKSIVNRYNELVDTTGLEHANKHVFGPQASSETGVAEGYVLKPVYPIFFNNGTRVAIKCKNSKFSEKAKSDKPIKAKVELTENDKRVLEIFSEYVTWNRVSNVLSHIGSVTAKDFGRVMGLTMKDIINEAAREGHDMLFADNPSAVRKELMILIQNTIRSKWHEVLE

SEQ ID NO: 527 - DNA, 1038 bp, synthetic construct
  misc_feature 1..1038: note = Engineered RNA ligase variants
  source 1..1038: mol_type = other DNA
atgcatcaccatcaccatcacggtggcagcggtatgtttgcgtattattcaagtctggaaaaccattacaataataagttcattgagaagatccgtggtgcaggcttcgatatgcagaccgtggaatgggtagctcgcgagaagattcatggaacgaactttagcgttatcattactccgaccgaaatcgtcccagccaaacgcacagggccgatcttggaaggcgagtcgttctttggtcatgaaattatcatgaaaaaatataaagactccttcgtgaaggtgcagaacatgctgaatgccatggatcttgttagcgtgcaaatctttggcgaatttgcgggtggtggcattcagaaaggcgtcgattacggagacaaagatttctatgtgtttgacatcctgtctgatagcgggaacgagaaagtttactgggatgactatcgcgtcgaatcgttttgcaccgccctcggtctgaaattagcgcctctgctgggacgtggtagtttcgctgaactgtcccagtacccaaacgatttcaaaagcattgtgaaccgttataatgaattggttgatacgacgggcctggaacatgccaataaacacgtctttggtccgcaagcgtcttctgaaactggcgtagcagaaggctacgttcttaaacccgtctatccgatcttctttaataatggtacacgcgtggcgattaaatgcaagaactccaaattttcggagaaagccaagagcgacaaaccaattaaagcgaaagtggaactgacggagaacgataaacgtgtgctcgaaatctttagcgagtatgttacctggaatcgcgtcagtaacgtactgtcacatattggctcagtgaccgcaaaagattttgggcgtgttatgggtctgacgatgaaagacatcattaatgaagcagcacgcgaaggccatgatatgttgttcgctgataacccgtcggcggtgaagaaagagctgactattctcatccgcaacacgattcgttccaaatggcacgaagttgtggag

SEQ ID NO: 528 - protein, 346 aa, synthetic construct
  REGION 1..346: note = Engineered RNA ligase variants
MHHHHHHGGSGMFAYYSSLENHYNNKFIEKIRGAGFDMQTVEWVAREKIHGTNFSVIITPTEIVPAKRTGPILEGESFFGHEIIMKKYKDSFVKVQNMLNAMDLVSVQIFGEFAGGGIQKGVDYGDKDFYVFDILSDSGNEKVYWDDYRVESFCTALGLKLAPLLGRGSFAELSQYPNDFKSIVNRYNELVDTTGLEHANKHVFGPQASSETGVAEGYVLKPVYPIFFNNGTRVAIKCKNSKFSEKAKSDKPIKAKVELTENDKRVLEIFSEYVTWNRVSNVLSHIGSVTAKDFGRVMGLTMKDIINEAAREGHDMLFADNPSAVKKELTILIRNTIRSKWHEVVE

SEQ ID NO: 529 - DNA, 1038 bp, synthetic construct
  misc_feature 1..1038: note = Engineered RNA ligase variants
  source 1..1038: mol_type = other DNA
atgcatcaccatcaccatcacggtggcagcggtatgtttgcgtattattcaagtctggaaaaccattacaataataagttcattgagaagatccgtggtgcaggcttcgatatgcataccgtggaatgggtagctcgcgagaagattcatggaacgaactttagcgttatcattactccgaccgaaatcgtcccagccaaacgcacagggccgatcttggaaggcgagtcgttctttggtcatgaaattatcatgaaaaaatataaagactccttcgtgaaggtgcagaacatgctgaatgccatggatcttgttagcgtgcaaatctttggcgaatttgcgggtggtggcattcagaaaggcgtcgattacggagacaaagatttctatgtgtttgacatcctgtctgatagcgggaacgagaaagtttactgggatgactatcgcgtcgaatcgttttgcaccacgctcggtctgaaattagcgcctctgctgggacgtggtagtttcgctgaactgtcccagtacccaaacgatttcaaaagcattgtgaaccgttataatgaattggttgatacgacgggcctggaacatgccaataaacacgtctttggtccgcaagcgtcttctgaaactggcgtagcagaaggctacgttcttaaacccgtctatccgatcttctttaatgatggtacacgcgtggcgattaaatgcaagaactccaaattttcggagaaagccaagagcgacaaaccaattaaagcgaaagtggaactgacggagaacgataaacgtctgctcgaaatctttagcgagtatgttacctggaatcgcgtcagtaacgtactgtcacatattggctcagtgaccgcaaaagattttgggcgtgttatgggtctgacgatgaaagacatcattaatgaagcagcacgcgaaggccatgatatgttgttcgctgataacccgtcggcggtgaagaaagagctgactattctcatccgcaacacgattcgttccaaatggcacgaagttctggag

SEQ ID NO: 530 - protein, 346 aa, synthetic construct
  REGION 1..346: note = Engineered RNA ligase variants
MHHHHHHGGSGMFAYYSSLENHYNNKFIEKIRGAGFDMHTVEWVAREKIHGTNFSVIITPTEIVPAKRTGPILEGESFFGHEIIMKKYKDSFVKVQNMLNAMDLVSVQIFGEFAGGGIQKGVDYGDKDFYVFDILSDSGNEKVYWDDYRVESFCTTLGLKLAPLLGRGSFAELSQYPNDFKSIVNRYNELVDTTGLEHANKHVFGPQASSETGVAEGYVLKPVYPIFFNDGTRVAIKCKNSKFSEKAKSDKPIKAKVELTENDKRLLEIFSEYVTWNRVSNVLSHIGSVTAKDFGRVMGLTMKDIINEAAREGHDMLFADNPSAVKKELTILIRNTIRSKWHEVLE

SEQ ID NO: 531 - DNA, 1038 bp, synthetic construct
  misc_feature 1..1038: note = Engineered RNA ligase variants
  source 1..1038: mol_type = other DNA
atggtacaccatcaccatcacggtggcagcggtatgtttgcgtattattcaagtctggaaaaccattacaataataagttcattgagaagatccgtggtgcaggcttcgatatgcacaccgtggaatgggtagctcgcgagaagattcatggaacgaactttagcgttatcattactccgaccgaaatcgtcccagccaaacgcacggggccgatcttggaaggcgagtcgttctttggtcacgaaattatcatgaaaaaatataaagactccttcgtgaaggtgcagaacatgctgaatgccatggatcttgttagcgtgcaaatctttggcgaatttgcgggtaacggcattcaaaaaggcgtcgattacggagacaaagatttctatgtgtttgacatcctgtctgatagcgggaacgagaaagtttggtgggatgactatcgcgtcgaatcgttttgcaccctgctcggtttcaaattagcgcctctgctgggacgtggtagtttcgctgaactgtcccagtacccaaacgatttcaagagcattgtgaaccgttataatgaattggttgatacgacgggcctggaacatgccaataaacatgtctttggtccgcaagcgtcttctgaaaccggcgtagcagaaggctacgttcttaaacccgtctatccgatcttctttaataatggtacacgcgtggcgattaaatgcaagaactccaaattttcggagaaagccaagagcgacaaaccaattaaagcgaaagtggaactgacggagaacgataaacgtgtgctcgaaatctttagcgagtatgttacctggaatcgcgtcagtaacgtactgtcacatattggctcagtgaccgcaaaagattttgggcgtgttatgggtctgacgatgaaagacatcattaatgaagcagcacgcgaaggccatgatatgttgttcgctgataacccgtcggcggtgaagaaagagctgaccattctcatccagaacacgattcgttccaaatggcacgaagttctggag

SEQ ID NO: 532 - protein, 346 aa, synthetic construct
  REGION 1..346: note = Engineered RNA ligase variants
MVHHHHHGGSGMFAYYSSLENHYNNKFIEKIRGAGFDMHTVEWVAREKIHGTNFSVIITPTEIVPAKRTGPILEGESFFGHEIIMKKYKDSFVKVQNMLNAMDLVSVQIFGEFAGNGIQKGVDYGDKDFYVFDILSDSGNEKVWWDDYRVESFCTLLGFKLAPLLGRGSFAELSQYPNDFKSIVNRYNELVDTTGLEHANKHVFGPQASSETGVAEGYVLKPVYPIFFNNGTRVAIKCKNSKFSEKAKSDKPIKAKVELTENDKRVLEIFSEYVTWNRVSNVLSHIGSVTAKDFGRVMGLTMKDIINEAAREGHDMLFADNPSAVKKELTILIQNTIRSKWHEVLE

SEQ ID NO: 533 - DNA, 1038 bp, synthetic construct
  misc_feature 1..1038: note = Engineered RNA ligase variants
  source 1..1038: mol_type = other DNA
atgcatcaccatcaccatcacggtggcagcggtatgtttgcgtattattcaagtctggaaaaccattacaataataagttcattgagaagatccgtggtgcaggcttcgatatgcataccgtggaatgggtagctcgcgagaagattcatggaacgaactttagcgttatcattactccgaccgaaatcgtcccagccaaacgcacagggccgatcttggaaggcgagtcgttctttggtcacgaaattatcatgaaaaaatataaagactccttcgtgaaggtgcagaacatgctgaatgccatggatcttgttagcgtgcaaatctttggcgaatttgcgggtggtggcattcagaaaggcgtcgattacggagacaaagatttctatgtgtttgacatcctgtctgatagcgggaacgagaaagtttactgggatgactatcgcgtcgaatcgttttgcaccgccctcggtctgaaattagcgcctctgctgggacgtggtagtttcgctgaactgtcccagtacccaaacgatttcaaaagcgtcgtgggccgttataatgaattggttgatacgacgggcctggaacatgccaataaacacgtctttggtccgcaagcgtcttctgaaactggcgtagcagaaggctacgttcttaaacccgtctatccgatcttctttaatgatggtacacgcgtggcgattaaatgcaagaactccaaattttcggagaaagccaagagcgacaaaccaattaaagcgaaagtggaactgacggagaacgataaacgtgtgctcgaaatctttagcgagtatgttacttggaatcgcgtcagtaacgtactgtcacatattggctcagtgaccgcaaaagattttgggcgtgttatgggtctgacgatgaaagacatcattaatgaagcagcacgcgaaggccatgatatgttgttcgctgataacccgtcggcggtgaagaaagagctgaccattctcatccagaacacgattcgttccaaatggcacgaagttctggag

SEQ ID NO: 534 - protein, 346 aa, synthetic construct
  REGION 1..346: note = Engineered RNA ligase variants
MHHHHHHGGSGMFAYYSSLENHYNNKFIEKIRGAGFDMHTVEWVAREKIHGTNFSVIITPTEIVPAKRTGPILEGESFFGHEIIMKKYKDSFVKVQNMLNAMDLVSVQIFGEFAGGGIQKGVDYGDKDFYVFDILSDSGNEKVYWDDYRVESFCTALGLKLAPLLGRGSFAELSQYPNDFKSVVGRYNELVDTTGLEHANKHVFGPQASSETGVAEGYVLKPVYPIFFNDGTRVAIKCKNSKFSEKAKSDKPIKAKVELTENDKRVLEIFSEYVTWNRVSNVLSHIGSVTAKDFGRVMGLTMKDIINEAAREGHDMLFADNPSAVKKELTILIQNTIRSKWHEVLE

SEQ ID NO: 535 - DNA, 1038 bp, synthetic construct
  misc_feature 1..1038: note = Engineered RNA ligase variants
  source 1..1038: mol_type = other DNA
atggaacaccatcaccatcacggtggcagcggtatgtttaagtattattcaagtctggaaaaccattacaataataagttcattgagaagatccgtggtgcaggcttcgatatgcacaccgtggaatgggtagctcgcgagaagattcatggaacgaactttagcgttatcattactccgaccgaaatcgtcccagccaaacgcacagggccgatcttggaaggcgagtcgttctttggtcacgaaattatcatgaaaaaatataaagactccttcgtgaaggtgcagaacatgctgaatgccatggatcttgttagcgtgcaaatctttggcgaatttgcgggtaacggcattcaaaaaggcgtcgattacggagacaaagatttctatgtgtttgacatcctgtctgatagcgggaacgagaaagtttattgggatgactatcgcgtcgaatcgttttgcaccacgctcggtctgaaattagcgcctctgctgggacgtggtagtttcgctgaactgtcccagtacccaaacgatttcaaaagcattgtgaaccgttataatgaattggttgatacgacgggcctggaacatgccaataaacacgtctttggtccgcaagcgtcttctgaaactggcgtagcagaaggctacgttcttaaacccgtctatccgatcttctttaataatggtacacgcgtggcgattaaatgcaagaactccaaattttcggagaaagccaagagcgacaaaccaattaaagcgaaagtggaactgacggagaacgataaacgtgtgctcgaaatctttagcgagtatgttacctggaatcgcgtcagtaacgtactgtcacatattggctcagtgaccgcaaaagattttgggcgtgttatgggtctgacgatgaaagacatcattaatgaagcagcacgcgaaggccatgatctgttgttcgctgataacccgtcggcggtgcgtaaagagctgatgattctcatccagaacacgattcgttccaaatggcacgaagttctggag

SEQ ID NO: 536 - protein, 346 aa, synthetic construct
  REGION 1..346: note = Engineered RNA ligase variants
MEHHHHHGGSGMFKYYSSLENHYNNKFIEKIRGAGFDMHTVEWVAREKIHGTNFSVIITPTEIVPAKRTGPILEGESFFGHEIIMKKYKDSFVKVQNMLNAMDLVSVQIFGEFAGNGIQKGVDYGDKDFYVFDILSDSGNEKVYWDDYRVESFCTTLGLKLAPLLGRGSFAELSQYPNDFKSIVNRYNELVDTTGLEHANKHVFGPQASSETGVAEGYVLKPVYPIFFNNGTRVAIKCKNSKFSEKAKSDKPIKAKVELTENDKRVLEIFSEYVTWNRVSNVLSHIGSVTAKDFGRVMGLTMKDIINEAAREGHDLLFADNPSAVRKELMILIQNTIRSKWHEVLE

SEQ ID NO: 537 - DNA, 1038 bp, synthetic construct
  misc_feature 1..1038: note = Engineered RNA ligase variants
  source 1..1038: mol_type = other DNA
atgcatcaccatcaccatcacggtggcagcggtatgtttgcgtattattcaagtctggaaaaccattacaataataagttcattgagaagatccgtggtgcaggcttcgatatgcagaccgtggaatgggtagctcgcgagaagattcatggaacgaactttagcgttatcattactccgaccgaagttgtcccagccaaacgcacagggccgatcttggaaggcgagtcgttctttggtcatgaaattatcatgaaaaaatataaagactccttcgtgaaggtgcagaacatgctgaatgccatggatcttgttagcgtgcaaatctttggcgaatttgcgggtggtggcattcagaaaggcgtcgattacggagacaaagatttctatgtgtttgacatcctgtctgatagcgggaacgagaaagtttactgggatgactatcgcgtcgaatcgttttgcaccgccctcggtctgaaattagcgcctctgctgggacgtggtagtttcgctgaactgtcccagtacccaaacgatttcaaaagcattgtgaaccgttataatgaattggttgatacgacgggcctggaacatgccaataaacacgtctttggtccgcaagcgtcttctgaaactggcgtagcagaaggctacgttcttaaacccgtctatccgatcttctttaatgatggtacacgcgtggcgattaaatgcaagaactccaaattttcggagaaagccaagagcgacaaaccaattaaagcgaaagtggaactgacggagaacgataaacgtgtgctcgaaatctttagcgagtatgttacctggaatcgcgtcagtaacgtactgtcacatattggctcagtgaccgcaaaagattttgggcgtgttatgggtctgacgatgaaagacatcattaatgaagcagcacgcgaaggccatgatctgttgttcgctgataacccgtcggcggtgaagaaagagctgaccattctcatccagaacacgattcgttccaaatggcacgaagttgtggag

SEQ ID NO: 538 - protein, 346 aa, synthetic construct
  REGION 1..346: note = Engineered RNA ligase variants
MHHHHHHGGSGMFAYYSSLENHYNNKFIEKIRGAGFDMQTVEWVAREKIHGTNFSVIITPTEVVPAKRTGPILEGESFFGHEIIMKKYKDSFVKVQNMLNAMDLVSVQIFGEFAGGGIQKGVDYGDKDFYVFDILSDSGNEKVYWDDYRVESFCTALGLKLAPLLGRGSFAELSQYPNDFKSIVNRYNELVDTTGLEHANKHVFGPQASSETGVAEGYVLKPVYPIFFNDGTRVAIKCKNSKFSEKAKSDKPIKAKVELTENDKRVLEIFSEYVTWNRVSNVLSHIGSVTAKDFGRVMGLTMKDIINEAAREGHDLLFADNPSAVKKELTILIQNTIRSKWHEVVE

SEQ ID NO: 539 - DNA, 1038 bp, synthetic construct
  misc_feature 1..1038: note = Engineered RNA ligase variants
  source 1..1038: mol_type = other DNA
atgcatcaccatcaccatcacggtggcagcggtatgtttgcgtattattcaagtctggaaaaccattacaataataagttcattgagaagatccgtggtgcaggcttcgatatgcacaccgtggaatgggtagctcgcgagaagattcatggaacgaactttagcgttatcattactccgaccgaaatcgtcccagccaaacgcgacgggccgatcttggaaggcgagtcgttctttggtcacgaaattatcatgaaaaaatataaagactccttcgtgaaggtgcagaacatgctgaatgccatggatcttgttagcgtgcaaatctttggcgaatttgcgggtggtggcattcagaaaggcgtcgattacggagacaaagatttctatgtgtttgacatcctgtctgatcgcgggaacgagaaagtttggtgggatgactatcgcgtcgaatcgttttgcaccactctcggtttcaaattagcgcctctgctgggacgtggtagtttcgctgaactgtcccagtacccaaacgatttcaagagcattgtgaaacgttataatgaattggttgatacgacgggcctggaacatgccaataaatatgtctttggtccgcaagcgtcttctgaaactggcgtagcagaaggctacgttcttaaacccgtctatccgatcttctttaataatggtacacgcgtggcgattaaatgcaagaactccaaattttcggagaaagccaagagcgacaaaccaattaaagcgaaagtggaactgacggagaacgataaacgtgtgctcgaaatctttagcgagtatgttacctggaatcgcgtcagtaacgtactgtcacatattggctcagtgaccgcaaaagattttgggcgtgttatgggtctgacgatgaaagacatcattaatgaagcagcacgcgaaggccatgatctgttgttcgctgataacccgtcggcggtgaagaaagagctgaccattctcatccagaacacgattcgttccaaatggcacgaagttctggag

SEQ ID NO: 540 - protein, 346 aa, synthetic construct
  REGION 1..346: note = Engineered RNA ligase variants
MHHHHHHGGSGMFAYYSSLENHYNNKFIEKIRGAGFDMHTVEWVAREKIHGTNFSVIITPTEIVPAKRDGPILEGESFFGHEIIMKKYKDSFVKVQNMLNAMDLVSVQIFGEFAGGGIQKGVDYGDKDFYVFDILSDRGNEKVWWDDYRVESFCTTLGFKLAPLLGRGSFAELSQYPNDFKSIVKRYNELVDTTGLEHANKYVFGPQASSETGVAEGYVLKPVYPIFFNNGTRVAIKCKNSKFSEKAKSDKPIKAKVELTENDKRVLEIFSEYVTWNRVSNVLSHIGSVTAKDFGRVMGLTMKDIINEAAREGHDLLFADNPSAVKKELTILIQNTIRSKWHEVLE

SEQ ID NO: 541 - DNA, 1038 bp, synthetic construct
  misc_feature 1..1038: note = Engineered RNA ligase variants
  source 1..1038: mol_type = other DNA
atgcatcaccatcaccatcacggtggcagcggtatgtttgcgtattattcaagtctggaaaaccattacaataataagttcattgagaagatccgtggtgcaggcttcgatatgcagaccgtggaatgggtagctcgcgagaagattcatggaacgaactttagcgttatcattactccgaccgaaatcgtcccagccaaacgcacagggccgatcttggaaggcgagtcgttctttggtcacgaaattatcatgaaaaaatataaagactccttcgtgaaggtgcagaacatgctgaatgccatggatcttgttagcgtgcaaatctttggcgaatttgcgggtggtggcattcagaaaggcgtcgattacggagacaaagatttctatgtgtttgacatcctgtctgatagcgggaacgagaaagtttactgggatgactatcgcgtcgaatcgttttgcacccaactcggtctgaaattagcgcctctgctgggacgtggtagtttcgctgaactgtcccagtacccaaacgatttcaaaagcatcgtgaaccgttataatgaattggttgatacgacgggcctggaacatgccaataaacacgtctttggtccgcaagcgtcttctgaaactggcgtagcagaaggctacgttcttaaacccgtctatccgatcttctttaataatggtacacgcgtggcgattaaatgcaagaactccaaattttcggagaaagccaagagcgacaaaccaattaaagcgaaactggaactgacggagaacgataaacgtctgctcgaaatctttagcgagtatgttacttggaatcgcgtcagtaacgtactgtcacatattggctcagtgaccgcaaaagattttgggcgtgttatgggtctgacgatgaaagacatcattaatgaagcagcacgcgaaggccatgatctgttgttcgctgataacccgtcggcggtgaagaaagagctgactattctcatccgcaacacgattcgttccaaatggcacgaagttctggag

SEQ ID NO: 542 - protein, 346 aa, synthetic construct
  REGION 1..346: note = Engineered RNA ligase variants
MHHHHHHGGSGMFAYYSSLENHYNNKFIEKIRGAGFDMQTVEWVAREKIHGTNFSVIITPTEIVPAKRTGPILEGESFFGHEIIMKKYKDSFVKVQNMLNAMDLVSVQIFGEFAGGGIQKGVDYGDKDFYVFDILSDSGNEKVYWDDYRVESFCTQLGLKLAPLLGRGSFAELSQYPNDFKSIVNRYNELVDTTGLEHANKHVFGPQASSETGVAEGYVLKPVYPIFFNNGTRVAIKCKNSKFSEKAKSDKPIKAKLELTENDKRLLEIFSEYVTWNRVSNVLSHIGSVTAKDFGRVMGLTMKDIINEAAREGHDLLFADNPSAVKKELTILIRNTIRSKWHEVLE

SEQ ID NO: 543 - DNA, 1038 bp, synthetic construct
  misc_feature 1..1038: note = Engineered RNA ligase variants
  source 1..1038: mol_type = other DNA
atgcatcaccatcaccatcacggtggcagcggtatgtttgcgtattattcaagtctggaaaaccattacaataataagttcattgagaagatccgtggtgcaggcttcgatatgcataccgtggaatgggtagctcgcgagaagattcatggaacgaactttagcgttatcattactccgaccgaaatcgtcccagccaaacgcacagggccgatcttggaaggcgagtcgttctttggtcatgaaattatcatgaaaaaatataaagactccttcgtgaaggtgcagaacatgctgaatgccatggatcttgttagcgtgcaaatctttggcgaatttgcgggtggtggcattcagaaaggcgtcgattacggagacaaagatttctatgtgtttgacatcctgtctgatagcgggaacgagaaagtttactgggatgactatcgcgtcgaatcgttttgcacccaactcggtctgaaattagcgcctctgctgggacgtggtagtttcgctgaactgtcccagtacccaaacgatttcaaaagcattgtgaaccgttataatgaattggttgatacgacgggcctggaacatgccaataaacacgtctttggtccgcaagcgtcttctgaaactggcgtagcagaaggctacgttcttaaacccgtctatccgatcttctttaataatggtacacgcgtggcgattaaatgcaagaactccaaattttcggagaaagccaagagcgacaaaccaattaaagcgaaactggaactgacggagaacgataaacgtgtgctcgaaatctttagcgagtatgttaattggaatcgcgtcagtaacgtactgtcacatattggctcagtgaccgcaaaagattttgggcgtgttatgggtctgacgatgaaagacatcattaatgaagcagcacgcgaaggccatgatatgttgttcgctgataacccgtcggcggtgaagaaagagctgactattctcatccgcaacacgattcgttccaaatggcacgaagttctggag

SEQ ID NO: 544 - protein, 346 aa, synthetic construct
  REGION 1..346: note = Engineered RNA ligase variants
MHHHHHHGGSGMFAYYSSLENHYNNKFIEKIRGAGFDMHTVEWVAREKIHGTNFSVIITPTEIVPAKRTGPILEGESFFGHEIIMKKYKDSFVKVQNMLNAMDLVSVQIFGEFAGGGIQKGVDYGDKDFYVFDILSDSGNEKVYWDDYRVESFCTQLGLKLAPLLGRGSFAELSQYPNDFKSIVNRYNELVDTTGLEHANKHVFGPQASSETGVAEGYVLKPVYPIFFNNGTRVAIKCKNSKFSEKAKSDKPIKAKLELTENDKRVLEIFSEYVNWNRVSNVLSHIGSVTAKDFGRVMGLTMKDIINEAAREGHDMLFADNPSAVKKELTILIRNTIRSKWHEVLE

SEQ ID NO: 545 - DNA, 1038 bp, synthetic construct
  misc_feature 1..1038: note = Engineered RNA ligase variants
  source 1..1038: mol_type = other DNA
atgcatcaccatcaccatcacggtggcagcggtatgtttgcgtattattcaagtctggaaaaccattacaataataagttcattgagaagatccgtggtgcaggcttcgatatgcacaccgtggaatgggtagctcgcgagaagattcatggaacgaactttagcgttatcattactccgaccgaaatcgtcccagccaaacgcacagggccgatcttggaaggcgagtcgttctttggtcacgaaattatcatgaaaaaatataaagactccttcgtgaaggtgcagaacatgctgaatgccatggatcttgttagcgtgcaaatctttggcgaatttgcgggtggtggcattcagaaaggcgtcgattacggagacaaagatttctatgtgtttgacatcctgtctgatagcgggaacgagaaagtttactgggatgactatcgcgtcgaatcgttttgcaccaccctcggtctgaaattagcgcctctgctgggacgtggtagtttcgctgaactgtcccagtacccaaacgatttcaaaagcgtcgtgaaccgttataatgaattggttgatacgacgggcctggaacatgccaataaacacgtctttggtccgcaagcgtcttctgaaactggcgtagcagaaggctacgttcttaaacccgtctatccgatcttctttaataatggtacacgcgtggcgattaaatgcaagaactccaaattttcggagaaagccaagagcgacaaaccaattaaagcgaaagtggaactgacggagaacgataaacgtgtgctcgaaatctttagcgagtatgttacctggaatcgcgtcagtaacgtactgtcacatattggctcagtgaccgcaaaagattttgggcgtgttatgggtctgacgatgaaagacatcattaatgaagcagcacgcgaaggccatgatatgttgttcgctgataacccgtcggcggtgaagaaagagctgaccattctcatccagaacacgattcgttccaaatggcacgaagttctggag

SEQ ID NO: 546 - protein, 346 aa, synthetic construct
  REGION 1..346: note = Engineered RNA ligase variants
MHHHHHHGGSGMFAYYSSLENHYNNKFIEKIRGAGFDMHTVEWVAREKIHGTNFSVIITPTEIVPAKRTGPILEGESFFGHEIIMKKYKDSFVKVQNMLNAMDLVSVQIFGEFAGGGIQKGVDYGDKDFYVFDILSDSGNEKVYWDDYRVESFCTTLGLKLAPLLGRGSFAELSQYPNDFKSVVNRYNELVDTTGLEHANKHVFGPQASSETGVAEGYVLKPVYPIFFNNGTRVAIKCKNSKFSEKAKSDKPIKAKVELTENDKRVLEIFSEYVTWNRVSNVLSHIGSVTAKDFGRVMGLTMKDIINEAAREGHDMLFADNPSAVKKELTILIQNTIRSKWHEVLE

SEQ ID NO: 547 - DNA, 1038 bp, synthetic construct
  misc_feature 1..1038: note = Engineered RNA ligase variants
  source 1..1038: mol_type = other DNA
atgcatcaccatcaccatcacggtggcagcggtatgtttgcgtattattcaagtctggaaaaccattacaataataagttcattgagaagatccgtggtgcaggcttcgatatgcacaccgtggaatgggtagctcgcgagaagattcatggaacgaactttagcgttatcattactccgaccgaaatcgtcccagccaaacgcacagggccgatcttggaaggcgagtcgttctttggtcacgaaattatcatgaaaaaatattgggactccttcgtgaaggtgcagaacatgctgaatgccatggatcttgttagcgtgcaaatctttggcgaatttgcgggtggtggcattcagaaaggcgtcgattacggagacaaagatttctatgtgtttgacatcctgtctgatagcgggaacgagaaagtttactgggatgactatcgcgtcgaatcgttttgcaccgccctcggtctgaaattagcgcctctgctgggacgtggtagtttcgctgaactgtcccagtacccaaacgatttcaaaagcatcgtgggccgttataatgaattggttgatacgacgggcctggaacatgccaataaacacgtctttggtccgcaagcgtcttctgaaactggcgtagcagaaggctacgttcttaaacccgtctatccgatcttctttaatgatggtacacgcgtggcgattaaatgcaagaactccaaattttcggagaaagccaagagcgacaaaccaattaaagcgaaagtggaactgacggagaacgataaacgtgtgctcgaaatctttagcgagtatgttacttggaatcgcgtcagtaacgtactgtcacatattggctcagtgaccgcaaaagattttgggcgtgttatgggtctgacgatgaaagacatcattaatgaagcagcacgcgaaggccatgatctgttgttcgctgataacccgtcggcggtgaagaaagagctgaccattctcatccagaacacgattcgttccaaatggcacgaagttgtggag

SEQ ID NO: 548 - protein, 346 aa, synthetic construct
  REGION 1..346: note = Engineered RNA ligase variants
MHHHHHHGGSGMFAYYSSLENHYNNKFIEKIRGAGFDMHTVEWVAREKIHGTNFSVIITPTEIVPAKRTGPILEGESFFGHEIIMKKYWDSFVKVQNMLNAMDLVSVQIFGEFAGGGIQKGVDYGDKDFYVFDILSDSGNEKVYWDDYRVESFCTALGLKLAPLLGRGSFAELSQYPNDFKSIVGRYNELVDTTGLEHANKHVFGPQASSETGVAEGYVLKPVYPIFFNDGTRVAIKCKNSKFSEKAKSDKPIKAKVELTENDKRVLEIFSEYVTWNRVSNVLSHIGSVTAKDFGRVMGLTMKDIINEAAREGHDLLFADNPSAVKKELTILIQNTIRSKWHEVVE

SEQ ID NO: 549 - DNA, 1038 bp, synthetic construct
  misc_feature 1..1038: note = Engineered RNA ligase variants
  source 1..1038: mol_type = other DNA
atggaacaccatcaccatcacggtggcagcggtatgtttaagtattattcaagtctggaaaaccattacaataataagttcattgagaagatccgtggtgcaggcttcgatatgcacaccgtggaatgggtagctcgcgagaagattcatggaacgaactttagcgttatcattactccgaccgaaatcgtcccagccaaacgcacggggccgatcttggaaggcgagtcgttctttggtcacgaaattatcatgaaaaaatataaagactccttcgtgaaggtgcagaacatgctgaatgccatggatcttgttagcgtgcaaatctttggcgaatttgcgggtgggggcattacgaaaggcgtcgattacggagacaaagatttctatgtgtttgacatcctgtctgatagcgggaacgagaaagtttactgggatgactatcgcgtcgaatcgttttgcaccacgctcggtctgaaattagcgcctctgctgggacgtggtagtttcgctgaactgtcccagtacccaaacgatttcaaaagcattgtgaaccgttataatgaattggttgatacgacgggcctggaacatgccaataaacacgtctttggtccgcaagcgtcttctgaaactggcgtagcagaaggctacgttcttaaacccgtctatccgatcttctttaataatggtacacgcgtggcgattaaatgcaagaactccaaattttcggagaaagccaagagcgacaaaccaattaaagcgaaagtggaactgacggagaacgataaacgtgtgctcgaaatctttagcgagtatgttacctggaatcgcgtcagtaacgtactgtcacatattggctcagtgaccgcaaaagattttgggcgtgttatgggtctgacgatgaaagacatcattaatgaagcagcacgcgaaggccatgatatgttgttcgctgataacccgtcggcggtgaagaaagagctgaccattctcatccagaacacgattcgttccaaatggcacgaagttctggag

SEQ ID NO: 550 - protein, 346 aa, synthetic construct
  REGION 1..346: note = Engineered RNA ligase variants
MEHHHHHGGSGMFKYYSSLENHYNNKFIEKIRGAGFDMHTVEWVAREKIHGTNFSVIITPTEIVPAKRTGPILEGESFFGHEIIMKKYKDSFVKVQNMLNAMDLVSVQIFGEFAGGGITKGVDYGDKDFYVFDILSDSGNEKVYWDDYRVESFCTTLGLKLAPLLGRGSFAELSQYPNDFKSIVNRYNELVDTTGLEHANKHVFGPQASSETGVAEGYVLKPVYPIFFNNGTRVAIKCKNSKFSEKAKSDKPIKAKVELTENDKRVLEIFSEYVTWNRVSNVLSHIGSVTAKDFGRVMGLTMKDIINEAAREGHDMLFADNPSAVKKELTILIQNTIRSKWHEVLE

SEQ ID NO: 551 - DNA, 1038 bp, synthetic construct
  misc_feature 1..1038: note = Engineered RNA ligase variants
  source 1..1038: mol_type = other DNA
atgcaccaccatcaccatcacggtggcagcggtatgtttgcctattattcaagtctggaaaaccattacaataataagttcattgagaagatccgtggtgcaggcttcgatatgcacaccgtggaatgggtagctcgcgagaagattcatggaacgaactttagcgttatcattactccgaccgaaatcgtcccagccaaacgcacggggccgatcttggaaggcgagtcgttctttggtcacgaaattatcatgaaaaaatataaagactccttcgtgaaggtgcagaacatgctgaatgccatggatcttgttagcgtgcaaatctttggcgaatttgcgggtggtggcattcagaaaggcgtcgattacggagacaaagatttctatgtgtttgacatcctgtctgatagcgggaacgagaaagtttggtgggatgactatcgcgtcgaatcgttttgcaccctgctcggtctgaaattagcgcctctgctgggacgtggtagtttcgctgaactgtcccagtacccaaacgatttcaagagcattgtgaaccgttataatgaattggttgatacgacgggcctggaacatgccaataaacacgtctttggtccgcaagcgtcttctgaaactggcgtagcagaaggctacgttcttaaacccgtctatccgatcttctttaataatggtacacgcgtggcgattaaatgcaagaactccaaattttcggagaaagccaagagcgacaaaccaattaaagcgaaagtggaactgacggagaacgataaacgtgtgctcgaaatctttagcgagtatgttacctggaatcgcgtcagtaacgtactgtcacatattggctcagtgaccgcaaaagattttgggcgtgttatgggtctgacgatgaaagacatcattaatgaagcagcacgcgaaggccatgatctgttgttcgctgataacccgtcggcggtgaagaaagagctgatgattctcatccagaacacgattcgttccaaatggcacgaagttctggag

SEQ ID NO: 552 - protein, 346 aa, synthetic construct
  REGION 1..346: note = Engineered RNA ligase variants
MHHHHHHGGSGMFAYYSSLENHYNNKFIEKIRGAGFDMHTVEWVAREKIHGTNFSVIITPTEIVPAKRTGPILEGESFFGHEIIMKKYKDSFVKVQNMLNAMDLVSVQIFGEFAGGGIQKGVDYGDKDFYVFDILSDSGNEKVWWDDYRVESFCTLLGLKLAPLLGRGSFAELSQYPNDFKSIVNRYNELVDTTGLEHANKHVFGPQASSETGVAEGYVLKPVYPIFFNNGTRVAIKCKNSKFSEKAKSDKPIKAKVELTENDKRVLEIFSEYVTWNRVSNVLSHIGSVTAKDFGRVMGLTMKDIINEAAREGHDLLFADNPSAVKKELMILIQNTIRSKWHEVLE

SEQ ID NO: 553 - DNA, 1038 bp, synthetic construct
  misc_feature 1..1038: note = Engineered RNA ligase variants
  source 1..1038: mol_type = other DNA
atgcatcaccatcaccatcacggtggcagcggtatgtttgcgtattattcaagtctggaaaaccattacaataataagttcattgagaagatccgtggtgcaggcttcgatatgcagaccgtggaatgggtagctcgcgagaagattcatggaacgaactttagcgttatcattactccgaccgaaatcgtcccagccaaacgcacagggccgatcttggaaggcgagtcgttctttggttatgaaattatcatgaaaaaatataaagactccttcgtgaaggtgcagaacatgctgaatgccatggatcttgttagcgtgcaaatctttggcgaatttgcgggtggtggcattcagaaaggcgtcgattacggagacaaagatttctatgtgtttgacatcctgtctgatagcgggaacgagaaagtttactgggatgactatcgcgtcgaatcgttttgcaccacgctcggtctgaaattagcgcctctgctgggacgtggtagtttcgctgaactgtcccagtacccaaacgatttcaaaagcatcgtgggccgttataatgaattggttgatacgacgggcctggaacatgccaataaacacgtctttggtccgcaagcgtcttctgaaactggcgtagcagaaggctacgttcttaaacccgtctatccgatcttctttaataatggtacacgcgtggcgattaaatgcaagaactccaaattttcggagaaagccaagagcgacaaaccaattaaagcgaaagtggaactgacggagaacgataaacgtgtgctcgaaatctttagcgagtatgttacctggaatcgcgtcagtaacgtactgtcacatattggctcagtgaccgcaaaagattttgggcgtgttatgggtctgacgatgaaagacatcattaatgaagcagcacgcgaaggccatgatctgttgttcgctgataacccgtcggcggtgaagaaagagctgactattctcatccgcaacacgattcgttccaaatggcacgaagttctggag

SEQ ID NO: 554 - protein, 346 aa, synthetic construct
  REGION 1..346: note = Engineered RNA ligase variants
MHHHHHHGGSGMFAYYSSLENHYNNKFIEKIRGAGFDMQTVEWVAREKIHGTNFSVIITPTEIVPAKRTGPILEGESFFGYEIIMKKYKDSFVKVQNMLNAMDLVSVQIFGEFAGGGIQKGVDYGDKDFYVFDILSDSGNEKVYWDDYRVESFCTTLGLKLAPLLGRGSFAELSQYPNDFKSIVGRYNELVDTTGLEHANKHVFGPQASSETGVAEGYVLKPVYPIFFNNGTRVAIKCKNSKFSEKAKSDKPIKAKVELTENDKRVLEIFSEYVTWNRVSNVLSHIGSVTAKDFGRVMGLTMKDIINEAAREGHDLLFADNPSAVKKELTILIRNTIRSKWHEVLE

SEQ ID NO: 555 - DNA, 1038 bp, synthetic construct
  misc_feature 1..1038: note = Engineered RNA ligase variants
  source 1..1038: mol_type = other DNA
atgcatcaccatcaccatcacggtggcagcggtatgtttgcgtattattcaagtctggaaaaccattacaataataagttcattgagaagatccgtggtgcaggcttcgatatgcataccgtggaatgggtagctcgcgagaagattcatggaacgaactttagcgttatcattactccgaccgaaatcgtcccagccaaacgcacagggccgatcttggaaggcgagtcgttctttggtcacgaaattatcatgaaaaaatatcatgactccttcgtgaaggtgcagaacatgctgaatgccatggatcttgttagcgtgcaaatctttggcgaatttgcgggtggtggcattcagaaaggcgtcgattacggagacaaagatttctatgtgtttgacatcctgtctgatagcgggaacgagaaagtttactgggatgactatcgcgtcgaatcgttttgcaccaccctcggtctgaaattagcgcctctgctgggacgtggtagtttcgctgaactgtcccagtacccaaacgatttcaaaagcatcgtgaaccgttataatgaattggttgatacgacgggcctggaacatgccaataaacacgtctttggtccgcaagcgtcttctgaaactggcgtagcagaaggctacgttcttaaacccgtctatccgatcttctttaatgatggtacacgcgtggcgattaaatgcaagaactccaaattttcggagaaagccaagagcgacaaaccaattaaagcgaaagtggaactgacggagaacgataaacgtctgctcgaaatctttagcgagtatgttacttggaatcgcgtcagtaacgtactgtcacatattggctcagtgaccgcaaaagattttgggcgtgttatgggtctgacgatgaaagacatcattaatgaagcagcacgcgaaggccatgatatgttgttcgctgataacccgtcggcggtgaagaaagagctgaccattctcatccagaacacgattcgttccaaatggcacgaagttgtggag

SEQ ID NO: 556 - protein, 346 aa, synthetic construct
  REGION 1..346: note = Engineered RNA ligase variants
MHHHHHHGGSGMFAYYSSLENHYNNKFIEKIRGAGFDMHTVEWVAREKIHGTNFSVIITPTEIVPAKRTGPILEGESFFGHEIIMKKYHDSFVKVQNMLNAMDLVSVQIFGEFAGGGIQKGVDYGDKDFYVFDILSDSGNEKVYWDDYRVESFCTTLGLKLAPLLGRGSFAELSQYPNDFKSIVNRYNELVDTTGLEHANKHVFGPQASSETGVAEGYVLKPVYPIFFNDGTRVAIKCKNSKFSEKAKSDKPIKAKVELTENDKRLLEIFSEYVTWNRVSNVLSHIGSVTAKDFGRVMGLTMKDIINEAAREGHDMLFADNPSAVKKELTILIQNTIRSKWHEVVE

SEQ ID NO: 557 - DNA, 1038 bp, synthetic construct
  misc_feature 1..1038: note = Engineered RNA ligase variants
  source 1..1038: mol_type = other DNA
atgcatcaccatcaccatcacggtggcagcggtatgtttgcgtattattcaagtctggaaaaccattacaataataagttcattgagaagatccgtggtgcaggcttcgatatgcagaccgtggaatgggtagctcgcgagaagattcatggaacgaactttagcgttatcattactccgaccgaaatcgtcccagccaaacgcacagggccgatcttggaaggcgagtcgttctttggtcacgaaattatcatgaaaaaatataaagactccttcgtgaaggtgcagaacatgctgaatgccatggatcttgttagcgtgcaaatctttggcgaatttgcgggtggtggcattcagaaaggcgtcgattacggagacaaagatttctatgtgtttgacatcctgtctgatagcgggaacgagaaagtttactgggatgactatcgcgtcgaatcgttttgcacccaactcggtctgaaattagcgcctctgctgggacgtggtagtttcgctgaactgtcccagtacccaaacgatttcaaaagcattgtgaaccgttataatgaattggttgatacgacgggcctggaacatgccaataaacacgtctttggtccgcaagcgtcttctgaaactggcgtagcagaaggctacgttcttaaacccgtctatccgatcttctttaatgatggtacacgcgtggcgattaaatgcaagaactccaaattttcggagaaagccaagagcgacaaaccaattaaagcgaaagtggaactgacggagaacgataaacgtgtgctcgaaatctttagcgagtatgttaattggaatcgcgtcagtaacgtactgtcacatattggctcagtgaccgcaaaagattttgggcgtgttatgggtctgacgatgaaagacatcattaatgaagcagcacgcgaaggccatgatctgttgttcgctgataacccgtcggcggtgaagaaagagctgaccattctcatccagaacacgattcgttccaaatggcacgaagttctggag

SEQ ID NO: 558 - protein, 346 aa, synthetic construct
  REGION 1..346: note = Engineered RNA ligase variants
MHHHHHHGGSGMFAYYSSLENHYNNKFIEKIRGAGFDMQTVEWVAREKIHGTNFSVIITPTEIVPAKRTGPILEGESFFGHEIIMKKYKDSFVKVQNMLNAMDLVSVQIFGEFAGGGIQKGVDYGDKDFYVFDILSDSGNEKVYWDDYRVESFCTQLGLKLAPLLGRGSFAELSQYPNDFKSIVNRYNELVDTTGLEHANKHVFGPQASSETGVAEGYVLKPVYPIFFNDGTRVAIKCKNSKFSEKAKSDKPIKAKVELTENDKRVLEIFSEYVNWNRVSNVLSHIGSVTAKDFGRVMGLTMKDIINEAAREGHDLLFADNPSAVKKELTILIQNTIRSKWHEVLE

SEQ ID NO: 559 - DNA, 1038 bp, synthetic construct
  misc_feature 1..1038: note = Engineered RNA ligase variants
  source 1..1038: mol_type = other DNA
atgcatcaccatcaccatcacggtggcagcggtatgtttgcgtattattcaagtctggaaaaccattacaataataagttcattgagaagatccgtggtgcaggcttcgatatgcagaccgtggaatgggtagctcgcgagaagattcatggaacgaactttagcgttatcattactccgaccgaaattgtcccagccaaacgcacagggccgatcttggaaggcgagtcgttctttggtcatgaaattatcatgaaaaaatataaagactccttcgtgaaggtgcagaacatgctgaatgccatggatcttgttagcgtgcaaatctttggcgaatttgcgggtggtggcattcagaaaggcgtcgattacggagacaaagatttctatgtgtttgacatcctgtctgatagcgggaacgagaaagtttactgggatgactatcgcgtcgaatcgttttgcacccaactcggtctgaaattagcgcctctgctgggacgtggtagtttcgctgaactgtcccagtacccaaacgatttcaaaagcatcgtgaaccgttataatgaattggttgatacgacgggcctggaacatgccaataaacacgtctttggtccgcaagcgtcttctgaaactggcgtagcagaaggctacgttcttaaacccgtctatccgatcttctttaatgatggtacacgcgtggcgattaaatgcaagaactccaaattttcggagaaagccaagagcgacaaaccaattaaagcgaaagtggaactgacggagaacgataaacgtctgctcgaaatctttagcgagtatgttacttggaatcgcgtcagtaacgtactgtcacatattggctcagtgaccgcaaaagattttgggcgtgttatgggtctgacgatgaaagacatcattaatgaagcagcacgcgaaggccatgatatgttgttcgctgataacccgtcggcggtgaagaaagagctgactattctcatccgccacacgattcgttccaaatggcacgaagttctggag

SEQ ID NO: 560 - protein, 346 aa, synthetic construct
  REGION 1..346: note = Engineered RNA ligase variants
MHHHHHHGGSGMFAYYSSLENHYNNKFIEKIRGAGFDMQTVEWVAREKIHGTNFSVIITPTEIVPAKRTGPILEGESFFGHEIIMKKYKDSFVKVQNMLNAMDLVSVQIFGEFAGGGIQKGVDYGDKDFYVFDILSDSGNEKVYWDDYRVESFCTQLGLKLAPLLGRGSFAELSQYPNDFKSIVNRYNELVDTTGLEHANKHVFGPQASSETGVAEGYVLKPVYPIFFNDGTRVAIKCKNSKFSEKAKSDKPIKAKVELTENDKRLLEIFSEYVTWNRVSNVLSHIGSVTAKDFGRVMGLTMKDIINEAAREGHDMLFADNPSAVKKELTILIRHTIRSKWHEVLE

SEQ ID NO: 561 - DNA, 1038 bp, synthetic construct
  misc_feature 1..1038: note = Engineered RNA ligase variants
  source 1..1038: mol_type = other DNA
atgcatcaccatcaccatcacggtggcagcggtatgtttgcgtattattcaagtctggaaaaccattacaataataagttcattgagaagatccgtggtgcaggcttcgatatgcataccgtggaatgggtagctcgcgagaagattcatggaacgaactttagcgttatcattactccgaccgaaatcgtcccagccaaacgcacagggccgatcttggaaggcgagtcgttctttggtcatgaaattatcatgaaaaaatataaagactccttcgtgaaggtgcagaacatgctgaatgccatggatcttgttagcgtgcaaatctttggcgaatttgcgggtggtggcattcagaaaggcgtcgattacggagacaaagatttctatgtgtttgacatcctgtctgatagcgggaacgagaaagtttactgggatgactatcgcgtcgaatcgttttgcacccaactcggtctgaaattagcgcctctgctgggacgtggtagtttcgctgaactgtcccagtacccaaacgatttcaaaagcatcgtgggccgttataatgaattggttgatacgacgggcctggaacatgccaataaacacgtctttggtccgcaagcgtcttctgaaactggcgtagcagaaggctacgttcttaaacccgtctatccgatcttctttaataatggtacacgcgtggcgattaaatgcaagaactccaaattttcggagaaagccaagagcgacaaaccaattaaagcgaaagtggaactgacggagaacgataaacgtgtgctcgaaatctttagcgagtatgttaattggaatcgcgtcagtaacgtactgtcacatattggctcagtgaccgcaaaagattttgggcgtgttatgggtctgacgatgaaagacatcattaatgaagcagcacgcgaaggccatgatctgttgttcgctgataacccgtcggcggtgaagaaagagctgcgtattctcatccaaaacacgattcgttccaaatggcacgaagttctggag

SEQ ID NO: 562 - protein, 346 aa, synthetic construct
  REGION 1..346: note = Engineered RNA ligase variants
MHHHHHHGGSGMFAYYSSLENHYNNKFIEKIRGAGFDMHTVEWVAREKIHGTNFSVIITPTEIVPAKRTGPILEGESFFGHEIIMKKYKDSFVKVQNMLNAMDLVSVQIFGEFAGGGIQKGVDYGDKDFYVFDILSDSGNEKVYWDDYRVESFCTQLGLKLAPLLGRGSFAELSQYPNDFKSIVGRYNELVDTTGLEHANKHVFGPQASSETGVAEGYVLKPVYPIFFNNGTRVAIKCKNSKFSEKAKSDKPIKAKVELTENDKRVLEIFSEYVNWNRVSNVLSHIGSVTAKDFGRVMGLTMKDIINEAAREGHDLLFADNPSAVKKELRILIQNTIRSKWHEVLE

SEQ ID NO: 563 - DNA, 1038 bp, synthetic construct
  misc_feature 1..1038: note = Engineered RNA ligase variants
  source 1..1038: mol_type = other DNA
atgcatcaccatcaccatcacggtggcagcggtatgtttgcctattattcaagtctggaaaaccattacaataataagttcattgagaagatccgtggtgcaggcttcgatatgcacaccgtggaatgggtagctcgcgagaagattcatggaacgaactttagcgttatcattactccgaccgaaatcgtcccagccaaacgcacggggccgatcttggaaggcgagtcgttctttggtcacgaaattatcatgaaaaaatataaagactccttcgtgaaggtgcagaacatgctgaatgccatggatcttgttagcgtgcaaatctttggcgaatttgcgggtgggggcattacgaaaggcgtcgattacggagacaaagatttctatgtgtttgacatcctgtctgatagcgggaacgagaaagtttactgggatgactatcgcgtcgaatcgttttgcaccaatctcggtctgaaattagcgcctctgctgggacgtggtagtttcgctgaactgtcccagtacccaaacgatttcaaaagcattgtgaaccgttataatgaattggttgatacgacgggcctggaacatgccaataaatatgtctttggtccgcaagcgtcttctgaaactggcgtagcagaaggctacgttcttaaacccgtctatccgatcttctttaataatggtacacgcgtggcgattaaatgcaagaactccaaattttcggagaaagccaagagcgacaaaccaattaaagcgaaagtggaactgacggagaacgataaacgtgtgctcgaaatctttagcgagtatgttacctggaatcgcgtcagtaacgtactgtcacatattggctcagtgaccgcaaaagattttgggcgtgttatgggtctgacgatgaaagacatcattaatgaagcagcacgcgaaggccatgatatgttgttcgctgataacccgtcggcggtgaagaaagagctgaccattctcatccagaacacgattcgttccaaatggcacgaagttctggag

SEQ ID NO: 564 - protein, 346 aa, synthetic construct
  REGION 1..346: note = Engineered RNA ligase variants
MHHHHHHGGSGMFAYYSSLENHYNNKFIEKIRGAGFDMHTVEWVAREKIHGTNFSVIITPTEIVPAKRTGPILEGESFFGHEIIMKKYKDSFVKVQNMLNAMDLVSVQIFGEFAGGGITKGVDYGDKDFYVFDILSDSGNEKVYWDDYRVESFCTNLGLKLAPLLGRGSFAELSQYPNDFKSIVNRYNELVDTTGLEHANKYVFGPQASSETGVAEGYVLKPVYPIFFNNGTRVAIKCKNSKFSEKAKSDKPIKAKVELTENDKRVLEIFSEYVTWNRVSNVLSHIGSVTAKDFGRVMGLTMKDIINEAAREGHDMLFADNPSAVKKELTILIQNTIRSKWHEVLE

SEQ ID NO: 565 - DNA, 1038 bp, synthetic construct
  misc_feature 1..1038: note = Engineered RNA ligase variants
  source 1..1038: mol_type = other DNA
atgcatcaccatcaccatcacggtggcagcggtatgtttgcgtattattcaagtctggaaaaccattacaataataagttcattgagaagatccgtggtgcaggcttcgatatgcacaccgtggaatgggtagctcgcgagaagattcatggaacgaactttagcgttatcattactccgaccgaaatcgtcccagccaaacgcacagggccgatcttggaaggcgagtcgttctttggtcacgaaattatcatgaaaaaatataaagactccttcgtgaaggtgcagaacatgctgaatgccatggatcttgttagcgtgcaaatctttggcgaatttgcgggtggtggcattcagaaaggcgtcgattacggagacaaagatttctatgtgtttgacatcctgtctgatagcgggaacgagaaagtttactgggatgactatcgcgtcgaatcgttttgcaccacgctcggtctgaaattagcgcctctgctgggacgtggtagtttcgctgaactgtcccagtacccaaacgatttcaaaagcatcgtgaaccgttataatgaattggttgatacgacgggcctggaacatgccaataaacacgtctttggtccgcaagcgtcttctgaaactggcgtagcagaaggctacgttcttaaacccgtctatccgatcttctttaatgatggtacacgcgtggcgattaaatgcaagaactccaaattttcggagaaagccaagagcgacaaaccaattaaagcgaaactggaactgacggagaacgataaacgtgtgctcgaaatctttagcgagtatgttaattggaatcgcgtcagtaacgtactgtcacatattggctcagtgaccgcaaaagattttgggcgtgttatgggtctgacgatgaaagacatcattaatgaagcagcacgcgaaggccatgatctgttgttcgctgataacccgtcggcggtgaagaaagagctgcgtattctcatccaaaacacgattcgttccaaatggcacgaagttgtggag

SEQ ID NO: 566 - protein, 346 aa, synthetic construct
  REGION 1..346: note = Engineered RNA ligase variants
MHHHHHHGGSGMFAYYSSLENHYNNKFIEKIRGAGFDMHTVEWVAREKIHGTNFSVIITPTEIVPAKRTGPILEGESFFGHEIIMKKYKDSFVKVQNMLNAMDLVSVQIFGEFAGGGIQKGVDYGDKDFYVFDILSDSGNEKVYWDDYRVESFCTTLGLKLAPLLGRGSFAELSQYPNDFKSIVNRYNELVDTTGLEHANKHVFGPQASSETGVAEGYVLKPVYPIFFNDGTRVAIKCKNSKFSEKAKSDKPIKAKLELTENDKRVLEIFSEYVNWNRVSNVLSHIGSVTAKDFGRVMGLTMKDIINEAAREGHDLLFADNPSAVKKELRILIQNTIRSKWHEVVE

SEQ ID NO: 567 - DNA, 1038 bp, synthetic construct
  misc_feature 1..1038: note = Engineered RNA ligase variants
  source 1..1038: mol_type = other DNA
atgcatcaccatcaccatcacggtggcagcggtatgtttgcgtattattcaagtctggaaaaccattacaataataagttcattgagaagatccgtggtgcaggcttcgatatgcacaccgtggaatgggtagctcgcgagaagattcatggaacgaactttagcgttatcattactccgaccgaaattgtcccagccaaacgcacagggccgatcttggaaggcgagtcgttctttggtcacgaaattatcatgaaaaaatataaagactccttcgtgaaggtgcagaacatgctgaatgccatggatcttgttagcgtgcaaatctttggcgaatttgcgggtggtggcattcagaaaggcgtcgattacggagacaaagatttctatgtgtttgacatcctgtctgatagcgggaacgagaaagtttactgggatgactatcgcgtcgaatcgttttgcaccacgctcggtctgaaattagcgcctctgctgggacgtggtagtttcgctgaactgtcccagtacccaaacgatttcaaaagcattgtgaaccgttataatgaattggttgatacgacgggcctggaacatgccaataaacacgtctttggtccgcaagcgtcttctgaaactggcgtagcagaaggctacgttcttaaacccgtctatccgatcttctttaatgatggtacacgcgtggcgattaaatgcaagaactccaaattttcggagaaagccaagagcgacaaaccaattaaagcgaaagtggaactgacggagaacgataaacgtgtgctcgaaatctttagcgagtatgttacctggaatcgcgtcagtaacgtactgtcacatattggctcagtgaccgcaaaagattttgggcgtgttatgggtctgacgatgaaagacatcattaatgaagcagcacgcgaaggccatgatatgttgttcgctgataacccgtcggcggtgaagaaagagctgaccattctcatccagaacacgattcgttccaaatggcacgaagttctggag

SEQ ID NO: 568 - protein, 346 aa, synthetic construct
  REGION 1..346: note = Engineered RNA ligase variants
MHHHHHHGGSGMFAYYSSLENHYNNKFIEKIRGAGFDMHTVEWVAREKIHGTNFSVIITPTEIVPAKRTGPILEGESFFGHEIIMKKYKDSFVKVQNMLNAMDLVSVQIFGEFAGGGIQKGVDYGDKDFYVFDILSDSGNEKVYWDDYRVESFCTTLGLKLAPLLGRGSFAELSQYPNDFKSIVNRYNELVDTTGLEHANKHVFGPQASSETGVAEGYVLKPVYPIFFNDGTRVAIKCKNSKFSEKAKSDKPIKAKVELTENDKRVLEIFSEYVTWNRVSNVLSHIGSVTAKDFGRVMGLTMKDIINEAAREGHDMLFADNPSAVKKELTILIQNTIRSKWHEVLE

SEQ ID NO: 569 - DNA, 1038 bp, synthetic construct
  misc_feature 1..1038: note = Engineered RNA ligase variants
  source 1..1038: mol_type = other DNA
atgcatcaccatcaccatcacggtggcagcggtatgtttgcgtattattcaagtctggaaaaccattacaataataagttcattgagaagatccgtggtgcaggcttcgatatgcacaccgtggaatgggtagctcgcgagaagattcatggaacgaactttagcgttatcattactccgaccgaaatcgtcccagccaaacgcacagggccgatcttggaaggcgagtcgttctttggttatgaaattatcatgaaaaaatataaagactccttcgtgaaggtgcagaacatgctgaatgccatggatcttgttagcgtgcaaatctttggcgaatttgcgggtggtggcattcagaaaggcgtcgattacggagacaaagatttctatgtgtttgacatcctgtctgatagcgggaacgagaaagtttactgggatgactatcgcgtcgaatcgttttgcacccaactcggtctgaaattagcgcctctgctgggacgtggtagtttcgctgaactgtcccagtacccaaacgatttcaaaagcatcgtgaaccgttataatgaattggttgatacgacgggcctggaacatgccaataaacacgtctttggtccgcaagcgtcttctgaaactggcgtagcagaaggctacgttcttaaacccgtctatccgatcttctttaataatggtacacgcgtggcgattaaatgcaagaactccaaattttcggagaaagccaagagcgacaaaccaattaaagcgaaagtggaactgacggagaacgataaacgtgtgctcgaaatctttagcgagtatgttacttggaatcgcgtcagtaacgtactgtcacatattggctcagtgaccgcaaaagattttgggcgtgttatgggtctgacgatgaaagacatcattaatgaagcagcacgcgaaggccatgatatgttgttcgctgataacccgtcggcggtgaagaaagagctgcgtattctcatccaacacacgattcgttccaaatggcacgaagttgtggag

SEQ ID NO: 570 - protein, 346 aa, synthetic construct
  REGION 1..346: note = Engineered RNA ligase variants
MHHHHHHGGSGMFAYYSSLENHYNNKFIEKIRGAGFDMHTVEWVAREKIHGTNFSVIITPTEIVPAKRTGPILEGESFFGYEIIMKKYKDSFVKVQNMLNAMDLVSVQIFGEFAGGGIQKGVDYGDKDFYVFDILSDSGNEKVYWDDYRVESFCTQLGLKLAPLLGRGSFAELSQYPNDFKSIVNRYNELVDTTGLEHANKHVFGPQASSETGVAEGYVLKPVYPIFFNNGTRVAIKCKNSKFSEKAKSDKPIKAKVELTENDKRVLEIFSEYVTWNRVSNVLSHIGSVTAKDFGRVMGLTMKDIINEAAREGHDMLFADNPSAVKKELRILIQHTIRSKWHEVVE

SEQ ID NO: 571 - DNA, 1038 bp, synthetic construct
  misc_feature 1..1038: note = Engineered RNA ligase variants
  source 1..1038: mol_type = other DNA
atgcatcaccatcaccatcacggtggcagcggtatgtttgcgtattattcaagtctggaaaaccattacaataataagttcattgagaagatccgtggtgcaggcttcgatatgcacaccgtggaatgggtagctcgcgagaagattcatggaacgaactttagcgttatcattactccgaccgaaatcgtcccagccaaacgcacagggccgatcttggaaggcgagtcgttctttggtcacgaaattatcatgaaaaaatataaagactccttcgtgaaggtgcagaacatgctgaatgccatggatcttgttagcgtgcaaatctttggcgaatttgcgggtggtggcattcagaaaggcgtcgattacggagacaaagatttctatgtgtttgacatcctgtctgatagcgggaacgagaaagtttactgggatgactatcgcgtcgaatcgttttgcaccgccctcggtctgaaattagcgcctctgctgggacgtggtagtttcgctgaactgtcccagtacccaaacgatttcaaaagcgtcgtgaaccgttataatgaattggttgatacgacgggcctggaacatgccaataaacacgtctttggtccgcaagcgtcttctgaaactggcgtagcagaaggctacgttcttaaacccgtctatccgatcttctttaatgatggtacacgcgtggcgattaaatgcaagaactccaaattttcggagaaagccaagagcgacaaaccaattaaagcgaaagtggaactgacggagaacgataaacgtctgctcgaaatctttagcgagtatgttacctggaatcgcgtcagtaacgtactgtcacatattggctcagtgaccgcaaaagattttgggcgtgttatgggtctgacgatgaaagacatcattaatgaagcagcacgcgaaggccatgatatgttgttcgctgataacccgtcggcggtgaagaaagagctgaccattctcatccagaacacgattcgttccaaatggcacgaagttctggag

SEQ ID NO: 572 - protein, 346 aa, synthetic construct
  REGION 1..346: note = Engineered RNA ligase variants
MHHHHHHGGSGMFAYYSSLENHYNNKFIEKIRGAGFDMHTVEWVAREKIHGTNFSVIITPTEIVPAKRTGPILEGESFFGHEIIMKKYKDSFVKVQNMLNAMDLVSVQIFGEFAGGGIQKGVDYGDKDFYVFDILSDSGNEKVYWDDYRVESFCTALGLKLAPLLGRGSFAELSQYPNDFKSVVNRYNELVDTTGLEHANKHVFGPQASSETGVAEGYVLKPVYPIFFNDGTRVAIKCKNSKFSEKAKSDKPIKAKVELTENDKRLLEIFSEYVTWNRVSNVLSHIGSVTAKDFGRVMGLTMKDIINEAAREGHDMLFADNPSAVKKELTILIQNTIRSKWHEVLE

SEQ ID NO: 573 - DNA, 1038 bp, synthetic construct
  misc_feature 1..1038: note = Engineered RNA ligase variants
  source 1..1038: mol_type = other DNA
atgcaccaccatcaccatcacggtggcagcggtatgtttgcgtattattcaagtctggaaaaccattacaataataagttcattgagaagatccgtggtgcaggcttcgatatgagtaccgtggaatgggtagctcgcgagaagattcatggaacgaactttagcgttatcattactccgaccgaaatcgtcccagccaaacgcacagggccgatcttggaaggcgagtcgttctttggtcacgaaattatcatgaaaaaatataaagactccttcgtgaaggtgcagaacatgctgaatgccatggatcttgttagcgtgcaaatctttggcgaatttgcgggtggtggcattcagaaaggcgtcgattacggagacaaagatttctatgtgtttgacatcctgtctgatagcgggaacgagaaagtttattgggatgactatcgcgtcgaatcgttttgcaccacgctcggtctgaaattagcgcctctgctgggacgtggtagtttcgctgaactgtcccagtacccaaacgatttcaagagcattgtgaaacgttataatgaattggttgatacgacgggcctggaacatgccaataaacacgtctttggtccgcaagcgtcttctgaaactggcgtagcagaaggctacgttcttaaacccgtctatccgatcttctttaataatggtacacgcgtggcgattaaatgcaagaactccaaattttcggagaaagccaagagcgacaaaccaattaaagcgaaagtggaactgacggagaacgataaacgtgtgctcgaaatctttagcgagtatgttacctggaatcgcgtcagtaacgtactgtcacatattggctcagtgaccgcaaaagattttgggcgtgttatgggtctgacgatgaaagacatcattaatgaagcagcacgcgaaggccatgatatgttgttcgctgataacccgtcggcggtgaagaaagagctgaccattctcatccagaacacgattcgttccaaatggcacgaagttctggag

SEQ ID NO: 574 - protein, 346 aa, synthetic construct
  REGION 1..346: note = Engineered RNA ligase variants
MHHHHHHGGSGMFAYYSSLENHYNNKFIEKIRGAGFDMSTVEWVAREKIHGTNFSVIITPTEIVPAKRTGPILEGESFFGHEIIMKKYKDSFVKVQNMLNAMDLVSVQIFGEFAGGGIQKGVDYGDKDFYVFDILSDSGNEKVYWDDYRVESFCTTLGLKLAPLLGRGSFAELSQYPNDFKSIVKRYNELVDTTGLEHANKHVFGPQASSETGVAEGYVLKPVYPIFFNNGTRVAIKCKNSKFSEKAKSDKPIKAKVELTENDKRVLEIFSEYVTWNRVSNVLSHIGSVTAKDFGRVMGLTMKDIINEAAREGHDMLFADNPSAVKKELTILIQNTIRSKWHEVLE

SEQ ID NO: 575 - DNA, 1038 bp, synthetic construct
  misc_feature 1..1038: note = Engineered RNA ligase variants
  source 1..1038: mol_type = other DNA
atgcatcaccatcaccatcacggtggcagcggtatgtttgcgtattattcaagtctggaaaaccattacaataataagttcattgagaagatccgtggtgcaggcttcgatatgcagaccgtggaatgggtagctcgcgagaagattcatggaacgaactttagcgttatcattactccgaccgaaatcgtcccagccaaacgcacagggccgatcttggaaggcgagtcgttctttggttatgaaattatcatgaaaaaatataaagactccttcgtgaaggtgcagaacatgctgaatgccatggatcttgttagcgtgcaaatctttggcgaatttgcgggtggtggcattcagaaaggcgtcgattacggagacaaagatttctatgtgtttgacatcctgtctgatagcgggaacgagaaagtttactgggatgactatcgcgtcgaatcgttttgcaccacgctcggtctgaaattagcgcctctgctgggacgtggtagtttcgctgaactgtcccagtacccaaacgatttcaaaagcgtcgtgaaccgttataatgaattggttgatacgacgggcctggaacatgccaataaacacgtctttggtccgcaagcgtcttctgaaactggcgtagcagaaggctacgttcttaaacccgtctatccgatcttctttaataatggtacacgcgtggcgattaaatgcaagaactccaaattttcggagaaagccaagagcgacaaaccaattaaagcgaaagtggaactgacggagaacgataaacgtgtgctcgaaatctttagcgagtatgttaattggaatcgcgtcagtaacgtactgtcacatattggctcagtgaccgcaaaagattttgggcgtgttatgggtctgacgatgaaagacatcattaatgaagcagcacgcgaaggccatgatctgttgttcgctgataacccgtcggcggtgaagaaagagctgactattctcatccgcaacacgattcgttccaaatggcacgaagttgtggag

SEQ ID NO: 576 - protein, 346 aa, synthetic construct
  REGION 1..346: note = Engineered RNA ligase variants
MHHHHHHGGSGMFAYYSSLENHYNNKFIEKIRGAGFDMQTVEWVAREKIHGTNFSVIITPTEIVPAKRTGPILEGESFFGYEIIMKKYKDSFVKVQNMLNAMDLVSVQIFGEFAGGGIQKGVDYGDKDFYVFDILSDSGNEKVYWDDYRVESFCTTLGLKLAPLLGRGSFAELSQYPNDFKSVVNRYNELVDTTGLEHANKHVFGPQASSETGVAEGYVLKPVYPIFFNNGTRVAIKCKNSKFSEKAKSDKPIKAKVELTENDKRVLEIFSEYVNWNRVSNVLSHIGSVTAKDFGRVMGLTMKDIINEAAREGHDLLFADNPSAVKKELTILIRNTIRSKWHEVVE

SEQ ID NO: 577 - DNA, 1038 bp, synthetic construct
  misc_feature 1..1038: note = Engineered RNA ligase variants
  source 1..1038: mol_type = other DNA
atgcatcaccatcaccatcacggtggcagcggtatgtttgcgtattattcaagtctggaaaaccattacaataataagttcattgagaagatccgtggtgcaggcttcgatatgcataccgtggaatgggtagctcgcgagaagattcatggaacgaactttagcgttatcattactccgaccgaaatcgtcccagccaaacgcacagggccgatcttggaaggcgagtcgttctttggtcacgaaattatcatgaaaaaatataaagactccttcgtgaaggtgcagaacatgctgaatgccatggatcttgttagcgtgcaaatctttggcgaatttgcgggtggtggcattcagaaaggcgtcgattacggagacaaagatttctatgtgtttgacatcctgtctgatagcgggaacgagaaagtttactgggatgactatcgcgtcgaatcgttttgcaccgccctcggtctgaaattagcgcctctgctgggacgtggtagtttcgctgaactgtcccagtacccaaacgatttcaaaagcattgtgaaccgttataatgaattggttgatacgacgggcctggaacatgccaataaacacgtctttggtccgcaagcgtcttctgaaactggcgtagcagaaggctacgttcttaaacccgtctatccgatcttctttaatgatggtacacgcgtggcgattaaatgcaagaactccaaattttcggagaaagccaagagcgacaaaccaattaaagcgaaactggaactgacggagaacgataaacgtgtgctcgaaatctttagcgagtatgttacctggaatcgcgtcagtaacgtactgtcacatattggctcagtgaccgcaaaagattttgggcgtgttatgggtctgacgatgaaagacatcattaatgaagcagcacgcgaaggccatgatctgttgttcgctgataacccgtcggcggtgaagaaagagctgaccattctcatccagaacacgattcgttccaaatggcacgaagttctggag

SEQ ID NO: 578 - protein, 346 aa, synthetic construct
  REGION 1..346: note = Engineered RNA ligase variants
MHHHHHHGGSGMFAYYSSLENHYNNKFIEKIRGAGFDMHTVEWVAREKIHGTNFSVIITPTEIVPAKRTGPILEGESFFGHEIIMKKYKDSFVKVQNMLNAMDLVSVQIFGEFAGGGIQKGVDYGDKDFYVFDILSDSGNEKVYWDDYRVESFCTALGLKLAPLLGRGSFAELSQYPNDFKSIVNRYNELVDTTGLEHANKHVFGPQASSETGVAEGYVLKPVYPIFFNDGTRVAIKCKNSKFSEKAKSDKPIKAKLELTENDKRVLEIFSEYVTWNRVSNVLSHIGSVTAKDFGRVMGLTMKDIINEAAREGHDLLFADNPSAVKKELTILIQNTIRSKWHEVLE

SEQ ID NO: 579 - DNA, 1038 bp, synthetic construct
  misc_feature 1..1038: note = Engineered RNA ligase variants
  source 1..1038: mol_type = other DNA
atgcaccaccatcaccatcacggtggcagcggtatgtttgcctattattcaagtctggaaaaccattacaataataagttcattgagaagatccgtggtgcaggcttcgatatgagtaccgtggaatgggtagctcgcgagaagattcatggaacgaactttagcgttatcattactccgaccgaaatcgtcccagccaaacgcacagggccgatcttggaaggcgagtcgttctttggtcacgaaattatcatgaaaaaatataaagactccttcgtgaaggtgcagaacatgctgaatgccatggatcttgttagcgtgcaaatctttggcgaatttgcgggtaacggcattcaaaaaggcgtcgattacggagacaaagatttctatgtgtttgacatcctgtctgatagcgggaacgagaaagtttactgggatgactatcgcgtcgaatcgttttgcaccaatctcggtctgaaattagcgcctctgctgggacgtggtagtttcgctgaactgtcccagtacccaaacgatttcaaaagcattgtgaaccgttataatgaattggttgatacgacgggcctggaacatgccaataaacacgtctttggtccgcaagcgtcttctgaaaccggcgtagcagaaggctacgttcttaaacccgtctatccgatcttctttaataatggtacacgcgtggcgattaaatgcaagaactccaaattttcggagaaagccaagagcgacaaaccaattaaagcgaaagtggaactgacggagaacgataaacgtgtgctcgaaatctttagcgagtatgttacctggaatcgcgtcagtaacgtactgtcacatattggctcagtgaccgcaaaagattttgggcgtgttatgggtctgacgatgaaagacatcattaatgaagcagcacgcgaaggccatgatatgttgttcgctgataacccgtcggcggtgaagaaagagctgaccattctcatccagaacacgattcgttccaaatggcacgaagttctggag

SEQ ID NO: 580 - protein, 346 aa, synthetic construct
  REGION 1..346: note = Engineered RNA ligase variants
MHHHHHHGGSGMFAYYSSLENHYNNKFIEKIRGAGFDMSTVEWVAREKIHGTNFSVIITPTEIVPAKRTGPILEGESFFGHEIIMKKYKDSFVKVQNMLNAMDLVSVQIFGEFAGNGIQKGVDYGDKDFYVFDILSDSGNEKVYWDDYRVESFCTNLGLKLAPLLGRGSFAELSQYPNDFKSIVNRYNELVDTTGLEHANKHVFGPQASSETGVAEGYVLKPVYPIFFNNGTRVAIKCKNSKFSEKAKSDKPIKAKVELTENDKRVLEIFSEYVTWNRVSNVLSHIGSVTAKDFGRVMGLTMKDIINEAAREGHDMLFADNPSAVKKELTILIQNTIRSKWHEVLE

SEQ ID NO: 581 - DNA, 1038 bp, synthetic construct
  misc_feature 1..1038: note = Engineered RNA ligase variants
  source 1..1038: mol_type = other DNA
atgcatcaccatcaccatcacggtggcagcggtatgtttgcgtattattcaagtctggaaaaccattacaataataagttcattgagaagatccgtggtgcaggcttcgatatgcataccgtggaatgggtagctcgcgagaagattcatggaacgaactttagcgttatcattactccgaccgaaattgtcccagccaaacgcacagggccgatcttggaaggcgagtcgttctttggtcatgaaattatcatgaaaaaatataaagactccttcgtgaaggtgcagaacatgctgaatgccatggatcttgttagcgtgcaaatctttggcgaatttgcgggtggtggcattcagaaaggcgtcgattacggagacaaagatttctatgtgtttgacatcctgtctgatagcgggaacgagaaagtttactgggatgactatcgcgtcgaatcgttttgcaccaccctcggtctgaaattagcgcctctgctgggacgtggtagtttcgctgaactgtcccagtacccaaacgatttcaaaagcgtcgtgggccgttataatgaattggttgatacgacgggcctggaacatgccaataaacacgtctttggtccgcaagcgtcttctgaaactggcgtagcagaaggctacgttcttaaacccgtctatccgatcttctttaataatggtacacgcgtggcgattaaatgcaagaactccaaattttcggagaaagccaagagcgacaaaccaattaaagcgaaactggaactgacggagaacgataaacgtgtgctcgaaatctttagcgagtatgttaattggaatcgcgtcagtaacgtactgtcacatattggctcagtgaccgcaaaagattttgggcgtgttatgggtctgacgatgaaagacatcattaatgaagcagcacgcgaaggccatgatctgttgttcgctgataacccgtcggcggtgaagaaagagctgcgtattctcatccgcaacacgattcgttccaaatggcacgaagttctggag

SEQ ID NO: 582 - protein, 346 aa, synthetic construct
  REGION 1..346: note = Engineered RNA ligase variants
MHHHHHHGGSGMFAYYSSLENHYNNKFIEKIRGAGFDMHTVEWVAREKIHGTNFSVIITPTEIVPAKRTGPILEGESFFGHEIIMKKYKDSFVKVQNMLNAMDLVSVQIFGEFAGGGIQKGVDYGDKDFYVFDILSDSGNEKVYWDDYRVESFCTTLGLKLAPLLGRGSFAELSQYPNDFKSVVGRYNELVDTTGLEHANKHVFGPQASSETGVAEGYVLKPVYPIFFNNGTRVAIKCKNSKFSEKAKSDKPIKAKLELTENDKRVLEIFSEYVNWNRVSNVLSHIGSVTAKDFGRVMGLTMKDIINEAAREGHDLLFADNPSAVKKELRILIRNTIRSKWHEVLE

SEQ ID NO: 583 - RNA, 14 nt, synthetic construct
  misc_feature 1..14: note = Sense strand fragment 1
  source 1..14: mol_type = other RNA
ttgccaagcttggt

SEQ ID NO: 584 - RNA, 10 nt, synthetic construct
  misc_feature 1..10: note = Sense strand fragment 2
  source 1..10: mol_type = other RNA
catctagcag

SEQ ID NO: 585 - RNA, 12 nt, synthetic construct
  misc_feature 1..12: note = Sense strand fragment 3
  source 1..12: mol_type = other RNA
ccgaaaggctgc

SEQ ID NO: 586 - RNA, 18 nt, synthetic construct
  misc_feature 1..18: note = Sense strand fragment 4
  source 1..18: mol_type = other RNA
catctagcagccgaaagg

SEQ ID NO: 587 - RNA, 12 nt, synthetic construct
  misc_feature 1..12: note = Antisense strand fragment 1
  source 1..12: mol_type = other RNA
agcttggcaagg

SEQ ID NO: 588 - RNA, 10 nt, synthetic construct
  misc_feature 1..10: note = Antisense strand fragment 2
  source 1..10: mol_type = other RNA
tagatgacca

SEQ ID NO: 589 - RNA, 36 nt, synthetic construct
  misc_feature 1..36: note = Product 1
  source 1..36: mol_type = other RNA
ttgccaagcttggtcatctagcagccgaaaggctgc

SEQ ID NO: 590 - RNA, 22 nt, synthetic construct
  misc_feature 1..22: note = Product 2
  source 1..22: mol_type = other RNA
tagatgaccaagcttggcaagg

What is claimed is:

1. An engineered RNA ligase, or a functional fragment thereof, comprising an amino acid sequence having at least 80%, 81%, 82%, 83%, 84%, 85%, 86%, 87%, 88%, 89%, 90%, 91%, 92%, 93%, 94%, 95%, 96%, 97%, 98%, 99%, or more sequence identity to a reference sequence corresponding to residues 12 to 346 of an even-numbered SEQ ID NO. of SEQ ID NOs: 14 and 24-582, or to a reference sequence corresponding to an even-numbered SEQ ID NO. of SEQ ID NOs: 14 and 24-582, wherein the amino acid sequence comprises one or more substitutions relative to the reference sequence corresponding to residues 12 to 346 of SEQ ID NO: 14, 42, or 204, or relative to the reference sequence corresponding to SEQ ID NO: 14, 42, or 204.

2. The engineered RNA ligase of claim 1, comprising an amino acid sequence having at least 80%, 81%, 82%, 83%, 84%, 85%, 86%, 87%, 88%, 89%, 90%, 91%, 92%, 93%, 94%, 95%, 96%, 97%, 98%, 99%, or more sequence identity to the reference sequence corresponding to residues 12 to 346 of SEQ ID NO: 14, 42, or 204, or to the reference sequence corresponding to SEQ ID NO: 14, 42, or 204, wherein the amino acid sequence comprises one or more substitutions relative to the reference sequence corresponding to residues 12 to 346 of SEQ ID NO: 14, 42, or 204, or relative to the reference sequence corresponding to SEQ ID NO: 14, 42, or 204.

3. The engineered RNA ligase of claim 1, comprising an amino acid sequence having at least 80%, 81%, 82%, 83%, 84%, 85%, 86%, 87%, 88%, 89%, 90%, 91%, 92%, 93%, 94%, 95%, 96%, 97%, 98%, 99%, or more sequence identity to the reference sequence corresponding to residues 12 to 346 of SEQ ID NO: 14, or to the reference sequence corresponding to SEQ ID NO: 14, wherein the amino acid sequence comprises one or more substitutions relative to the reference sequence corresponding to residues 12 to 346 of SEQ ID NO: 14, or relative to the reference sequence corresponding to SEQ ID NO: 14.

4. The engineered RNA ligase of claim 1, comprising an amino acid sequence having at least 80%, 81%, 82%, 83%, 84%, 85%, 86%, 87%, 88%, 89%, 90%, 91%, 92%, 93%, 94%, 95%, 96%, 97%, 98%, 99%, or more sequence identity to the reference sequence corresponding to residues 12 to 346 of SEQ ID NO: 42 or 204, or to the reference sequence corresponding to SEQ ID NO: 42 or 204, wherein the amino acid sequence comprises one or more substitutions relative to the reference sequence corresponding to residues 12 to 346 of SEQ ID NO: 14, or relative to the reference sequence corresponding to SEQ ID NO: 14.

5. The engineered RNA ligase of claim 1, comprising an amino acid sequence having at least 80%, 81%, 82%, 83%, 84%, 85%, 86%, 87%, 88%, 89%, 90%, 91%, 92%, 93%, 94%, 95%, 96%, 97%, 98%, 99%, or more sequence identity to the reference sequence corresponding to residues 12 to 346 of an even-numbered SEQ ID NO. of SEQ ID NOs: 24-582, or to the reference sequence corresponding to an even-numbered SEQ ID NO. of SEQ ID NOs: 24-582, wherein the amino acid sequence comprises one or more substitutions relative to the reference sequence corresponding to residues 12 to 346 of SEQ ID NO: 14, or relative to the reference sequence corresponding to SEQ ID NO: 14.

6. The engineered RNA ligase of claim 1, comprising an amino acid sequence having at least 80%, 81%, 82%, 83%, 84%, 85%, 86%, 87%, 88%, 89%, 90%, 91%, 92%, 93%, 94%, 95%, 96%, 97%, 98%, 99%, or more sequence identity to the reference sequence corresponding to residues 12 to 346 of an even-numbered SEQ ID NO. of SEQ ID NOs: 24-128, or to the reference sequence corresponding to an even-numbered SEQ ID NO. of SEQ ID NOs: 24-128, wherein the amino acid sequence comprises one or more substitutions relative to the reference sequence corresponding to residues 12 to 346 of SEQ ID NO: 14, or relative to the reference sequence corresponding to SEQ ID NO: 14.

7. The engineered RNA ligase of any one of claims 1-6, wherein the amino acid sequence of the engineered RNA ligase comprises at least a substitution at amino acid position 2, 14, 15, 18, 33, 39, 63, 69, 81, 83, 85, 86, 89, 95, 116, 117, 119, 138, 142, 144, 149, 154, 156, 159, 171, 175, 177, 181, 185, 186, 195, 202, 212, 214, 224, 226, 230, 247, 256, 257, 260, 266, 275, 280, 283, 285, 288, 291, 296, 303, 306, 307, 310, 314, 315, 316, 317, 326, 330, 331, 333, 334, 335, 337, 339, 342, or 345, or combinations thereof, wherein the amino acid positions are relative to the reference sequence corresponding to residues 12 to 346 of SEQ ID NO: 14, or relative to the reference sequence corresponding to SEQ ID NO: 14.

8. The engineered RNA ligase of any one of claims 1-6, wherein the amino acid sequence of the engineered RNA ligase comprises at least a substitution or amino acid residue 2G/V/E, 14K, 15L/E/M/P/Y, 18I, 33L, 39Q/S, 63V, 69D, 81Y, 85L, 86G, 89H/I/M/W, 95V, 116N, 117D, 119T, 138R, 142R, 144W, 149R/T, 154C, 156A/L/N/Q/T, 159F, 171E, 175K, 177P, 181D, 183V, 185G/K, 186D/R, 195G, 202Y, 212I, 214I, 224Y, 226I, 230D, 247K, 256A, 257L, 260S, 266L, 275N, 280G/N, 283I, 285K, 288E, 291P, 296K, 303Q, 306L, 307E/Q, 310K, 314W, 315S/T, 316L, 317A, 326R, 330M/R, 331R/W, 333V, 334R, 335D/H, 337L, 339P, 342I, or 345V, or combinations thereof, wherein the amino acid positions are relative to the reference sequence corresponding to residues 12 to 346 of SEQ ID NO: 14, or relative to the reference sequence corresponding to SEQ ID NO: 14.

9. The engineered RNA ligase of any one of claims 1-6, wherein the amino acid sequence of the engineered RNA ligase comprises at least a substitution at amino acid position 95 or 177, or combination thereof, wherein the amino acid positions are relative to the reference sequence corresponding to residues 12 to 346 of SEQ ID NO: 14, or relative to the reference sequence corresponding to SEQ ID NO: 14.

10. The engineered RNA ligase of any one of claims 1-6, wherein the amino acid sequence of the engineered RNA ligase comprises at least a substitution or amino acid residue 95V or 177P, or combination thereof, wherein the amino acid positions are relative to the reference sequence corresponding to residues 12 to 346 of SEQ ID NO: 14, or relative to the reference sequence corresponding to SEQ ID NO: 14.

11. The engineered RNA ligase of any one of claims 1-6, wherein the amino acid sequence of the engineered RNA ligase comprises at least a substitution at amino acid position 15, 95, 149, 154, 156, 177, 186, 195, 224, or 226, or combinations thereof, wherein the amino acid positions are relative to the reference sequence corresponding to residues 12 to 346 of SEQ ID NO: 14, or relative to the reference sequence corresponding to SEQ ID NO: 14.

12. The engineered RNA ligase of any one of claims 1-6, wherein the amino acid sequence of the engineered RNA ligase comprises at least a substitution or amino acid residue 15L/E/M/P/Y, 95V, 149R/T, 154C, 156A/L/N/Q/T, 177P, 186D/R, 195G, 224Y, or 226I, or combinations thereof, wherein the amino acid positions are relative to the reference sequence corresponding to residues 12 to 346 of SEQ ID NO: 14, or relative to the reference sequence corresponding to SEQ ID NO: 14.

13. The engineered RNA ligase of any one of claims 1-6, wherein the amino acid sequence of the engineered RNA ligase comprises at least a substitution or amino acid residue 15Y, 95V, 149R, 154C, 156T, 177P, 186R, 195G, 224Y, or 226I, or combinations thereof, wherein the amino acid positions are relative to the reference sequence corresponding to residues 12 to 346 of SEQ ID NO: 14, or relative to the reference sequence corresponding to SEQ ID NO: 14.

14. The engineered RNA ligase of any one of claims 1-6, wherein the amino acid sequence of the engineered RNA ligase comprises at least a substitution or substitution set at amino acid position(s) 177/260/307/345, 171/175/183/280/283/303, 95/159/177/260/288, 175/183/247/280/283/296, 177/307, 81/171/183/335, 175/183, 81/175/183/280/296/335/339, 81/183/247/266, 95/177, 171/280/283/296/303, 85/177/260/288/333/345, 177/291/307/333, 81/171/175/183/316/337, 81/171/266/280/283/335/339, 177, 95/159/177/260/280/288/306/345, 171/175/335, 177/260/30/333, 14/95/177/288/307, 95/177/345, 95/159/177/260/285/288, 266/296, 81/283/335/337, 95/159/177/260/342/345, 63/171/175/183/266/280/296/316, 280/335/337, 81/171/280, 81/171/175/296/316, 171/175/316/335, 171/280/283/296/316, 171/283/335, 63/171/175/183/266/283/303/316, 171/247/266/283/296/303/316/335, 63/81/171/175/183/266/280/283/337, 81/171/303/316/335, 288/307, 14/95/159/177/345, 81/171/175/183/247/266/280/283, 81/247/266, 280, 85/177/260, 63/183, 175/183/247/280/283/316, 291, 247, 171/280/283, 81/171/175/280/316, 333, 171/296/316, 81/171, or 280/316/335, wherein the amino acid positions are relative to the reference sequence corresponding to residues 12 to 346 of SEQ ID NO: 14, or relative to the reference sequence corresponding to SEQ ID NO: 14.

15. The engineered RNA ligase of any one of claims 1-6, wherein the amino acid sequence of the engineered RNA ligase comprises at least a substitution or substitution set 177P/260S/307E/345V, 171E/175K/183V/280N/283I/303Q, 95V/159F/177P/260S/288E, 175K/183V/247K/280N/283I/296K, 177P/307E, 81Y/171E/183V/335D, 175K/183V, 81Y/175K/183V/280N/296K/335D/339P, 81Y/183V/247K/266L, 95V/177P, 171E/280N/283I/296K/303Q, 85L/177P/260S/288E/333V/345V, 177P/291P/307E/333V, 81Y/171E/175K/183V/316L/337L, 81Y/171E/266L/280N/283I/335D/339P, 177P, 95V/159F/177P/260S/280N/288E/306L/345V, 171E/175K/335D, 177P/260S/306L/333V, 14K/95V/177P/288E/307E, 95V/177P/345V, 95V/159F/177P/260S/285K/288E, 266L/296K, 81Y/283I/335D/337L, 95V/159F/177P/260S/342I/345V, 63V/171E/175K/183V/266L/280N/296K/316L, 280N/335D/337L, 81Y/171E/280N, 81Y/171E/175K/296K/316L, 171E/175K/316L/335D, 171E/280N/283I/296K/316L, 171E/283I/335D, 63V/171E/175K/183V/266L/283I/303Q/316L, 171E/247K/266L/283I/296K/303Q/316L/335D, 63V/81Y/171E/175K/183V/266L/280N/283I/337L, 81Y/171E/303Q/316L/335D, 288E/307E, 14K/95V/159F/177P/345V, 81Y/171E/175K/183V/247K/266L/280N/283I, 81Y/247K/266L, 280N, 85L/177P/260S, 63V/183V, 175K/183V/247K/280N/283I/316L, 291P, 247K, 171E/280N/283I, 81Y/171E/175K/280N/316L, 333V, 171E/296K/316L, 81Y/171E, or 280N/316L/335D, wherein the amino acid positions are relative to the reference sequence corresponding to residues 12 to 346 of SEQ ID NO: 14, or relative to the reference sequence corresponding to SEQ ID NO: 14.

16. The engineered RNA ligase of claim 1, wherein the amino acid sequence of the engineered RNA ligase comprises at least one substitution provided in Tables 5.1, 6.1, 7.1, 8.1, 9.1, 10.1, 11.1, and 12.1, wherein the amino acid positions are relative to the reference sequence corresponding to residues 12 to 346 of SEQ ID NO: 14, or relative to the reference sequence corresponding to SEQ ID NO: 14.

17. The engineered RNA ligase of claim 1, wherein the amino acid sequence of the engineered RNA ligase comprises at least a substitution or substitution set of an RNA ligase variant provided in Tables 5.1, 6.1, 7.1, 8.1, 9.1, 10.1, 11.1, and 12.1, wherein the amino acid positions are relative to the reference sequence corresponding to residues 12 to 346 of SEQ ID NO: 14, or relative to the reference sequence corresponding to SEQ ID NO: 14.

18. The engineered RNA ligase of claim 1, comprising an amino acid sequence having at least 80%, 81%, 82%, 83%, 84%, 85%, 86%, 87%, 88%, 89%, 90%, 91%, 92%, 93%, 94%, 95%, 96%, 97%, 98%, 99%, or more sequence identity to the reference sequence corresponding to residues 12 to 346 of SEQ ID NO: 42 or 204, or to the reference sequence corresponding to SEQ ID NO: 42 or 204.

19. The engineered RNA ligase of claim 1, comprising an amino acid sequence having at least 80%, 81%, 82%, 83%, 84%, 85%, 86%, 87%, 88%, 89%, 90%, 91%, 92%, 93%, 94%, 95%, 96%, 97%, 98%, 99%, or more sequence identity to the reference sequence corresponding to residues 12 to 346 of an even-numbered SEQ ID NO. of SEQ ID NOs: 24-582, or to the reference sequence corresponding to an even-numbered SEQ ID NO. of SEQ ID NOs: 24-582.

20. The engineered RNA ligase of claim 1, comprising an amino acid sequence having at least 80%, 81%, 82%, 83%, 84%, 85%, 86%, 87%, 88%, 89%, 90%, 91%, 92%, 93%, 94%, 95%, 96%, 97%, 98%, 99%, or more sequence identity to the reference sequence corresponding to residues 12 to 346 of SEQ ID NO: 42 or 204, or to the reference sequence corresponding to SEQ ID NO: 42 or 204, wherein the amino acid sequence comprises one or more substitutions relative to the reference sequence corresponding to residues 12 to 346 of SEQ ID NO: 42 or 204, or relative to the reference sequence corresponding to SEQ ID NO: 42 or 204.

21. The engineered RNA ligase of claim 1, comprising an amino acid sequence having at least 80%, 81%, 82%, 83%, 84%, 85%, 86%, 87%, 88%, 89%, 90%, 91%, 92%, 93%, 94%, 95%, 96%, 97%, 98%, 99%, or more sequence identity to the reference sequence corresponding to residues 12 to 346 of an even-numbered SEQ ID NO. of SEQ ID NOs: 24-582, or to the reference sequence corresponding to an even-numbered SEQ ID NO. of SEQ ID NOs: 24-582, wherein the amino acid sequence comprises one or more substitutions relative to the reference sequence corresponding to residues 12 to 346 of SEQ ID NO: 42 or 204, or relative to the reference sequence corresponding to SEQ ID NO: 42 or 204.

22. The engineered RNA ligase of claim 20 or 21, wherein the amino acid sequence of the engineered RNA ligase comprises at least a substitution at amino acid position 2, 14, 15, 18, 33, 39, 63, 69, 81, 83, 85, 86, 89, 95, 116, 117, 119, 138, 142, 144, 149, 154, 156, 159, 171, 175, 177, 181, 185, 186, 195, 202, 212, 214, 224, 226, 230, 247, 256, 257, 260, 266, 275, 280, 283, 285, 288, 291, 296, 303, 306, 307, 310, 314, 315, 316, 317, 326, 330, 331, 333, 334, 335, 337, 339, 342, or 345, or combinations thereof, wherein the amino acid positions are relative to the reference sequence corresponding to residues 12 to 346 of SEQ ID NO: 42 or 204, or relative to the reference sequence corresponding to SEQ ID NO: 42 or 204.

23. The engineered RNA ligase of claim 20 or 21, wherein the amino acid sequence of the engineered RNA ligase comprises at least a substitution or an amino acid residue 2G/V/E, 14K, 15E/L/M/P/Y, 18I, 33L, 39Q/S, 63V, 69D, 81Y, 85L, 86G, 89H/I/M/W, 95V, 116N, 117D, 119T, 138R, 142R, 144W, 149R/T, 154C, 156A/L/N/Q/T, 159F, 171E, 175K, 177P, 181D, 183V, 185G/K, 186D/R, 195G, 202Y, 212I, 214I, 224Y, 226I, 230D, 247K, 256A, 257L, 260S, 266L, 275N, 280G/N, 283I, 285K, 288E, 291P, 296K, 303Q, 306L, 307E/Q, 310K, 314W, 315S/T, 316L, 317A, 326R, 330M/R, 331R/W, 333V, 334R, 335D/H, 337L, 339P, 342I, or 345V, or combinations thereof, wherein the amino acid positions are relative to the reference sequence corresponding to residues 12 to 346 of SEQ ID NO: 42 or 204, or relative to the reference sequence corresponding to SEQ ID NO: 42 or 204.

24. The engineered RNA ligase of claim 20 or 21, wherein the amino acid sequence of the engineered RNA ligase comprises at least a substitution at amino acid position 95 or 177, or combination thereof, wherein the amino acid positions are relative to the reference sequence corresponding to residues 12 to 346 of SEQ ID NO: 42 or 204, or relative to the reference sequence corresponding to SEQ ID NO: 42 or 204.

25. The engineered RNA ligase of claim 20 or 21, wherein the amino acid sequence of the engineered RNA ligase comprises at least a substitution or amino acid residue 95V or 177P, or combination thereof, wherein the amino acid positions are relative to the reference sequence corresponding to residues 12 to 346 of SEQ ID NO: 42 or 204, or relative to the reference sequence corresponding to SEQ ID NO: 42 or 204.

26. The engineered RNA ligase of claim 20 or 21, wherein the amino acid sequence of the engineered RNA ligase comprises at least a substitution at amino acid position 15, 95, 149, 154, 156, 177, 186, 195, 224, or 226, or combinations thereof, wherein the amino acid positions are relative to the reference sequence corresponding to residues 12 to 346 of SEQ ID NO: 42 or 204, or relative to the reference sequence corresponding to SEQ ID NO: 42 or 204.

27. The engineered RNA ligase of claim 20 or 21, wherein the amino acid sequence of the engineered RNA ligase comprises at least a substitution 15Y, 95V, 149R, 154C, 156T, 177P, 186R, 195G, 224Y, or 226I, or combinations thereof, wherein the amino acid positions are relative to the reference sequence corresponding to residues 12 to 346 of SEQ ID NO: 42 or 204, or relative to the reference sequence corresponding to SEQ ID NO: 42 or 204.

28. The engineered RNA ligase of claim 20, comprising an amino acid sequence having at least 80%, 81%, 82%, 83%, 84%, 85%, 86%, 87%, 88%, 89%, 90%, 91%, 92%, 93%, 94%, 95%, 96%, 97%, 98%, 99%, or more sequence identity to the reference sequence corresponding to residues 12 to 346 of SEQ ID NO: 42, or to the reference sequence corresponding to SEQ ID NO: 42, wherein the amino acid sequence comprises one or more substitutions relative to the reference sequence corresponding to residues 12 to 346 of SEQ ID NO: 42, or relative to the reference sequence corresponding to SEQ ID NO: 42.

29. The engineered RNA ligase of claim 21, comprising an amino acid sequence having at least 80%, 81%, 82%, 83%, 84%, 85%, 86%, 87%, 88%, 89%, 90%, 91%, 92%, 93%, 94%, 95%, 96%, 97%, 98%, 99%, or more sequence identity to the reference sequence corresponding to residues 12 to 346 of an even-numbered SEQ ID NO. of SEQ ID NOs: 130-478, or to the reference sequence corresponding to an even-numbered SEQ ID NO. of SEQ ID NOs: 130-478, wherein the amino acid sequence comprises one or more substitutions relative to the reference sequence corresponding to residues 12 to 346 of SEQ ID NO: 42, or relative to the reference sequence corresponding to SEQ ID NO: 42.

30. The engineered RNA ligase of claim 28 or 29, wherein the amino acid sequence of the engineered RNA ligase comprises a substitution or substitution set at amino acid positions(s) 149/156/195, 15/149/186/224/317, 15/156/195/224/226/317/331, 15/195/317/331, 149/224/331, 15/195/224/226/317/331, 15/33/86/149/154/195/317, 15/86/154/156/186/195/224/226/331, 15/149/224/317/331, 15/154/156/186/317/331, 15/33/149/224/226/331, 15/186/224/226/317/331, 15/33/149/186/224/331, 195/224/331, 15/86/156/186/195/226/317/331, 15/195/22/331, 156/186/224/226/331, 15/149/154/156/224/226, 33/156/186/195/331, 15/86/149/154/156/317/331, 15/186/317/331, 15/86/149/154/195/331, 15/33/149/154/156/226, 15/149/154/186/317/331, 195/331, 15/86/156/186/195/331, 149/156/224/226/331, 15/149/154/156/186/317/331, 15/154/186/195, 15/86/195/224/226, 230, 15/33/156/331, 15/33/156/195/224/226, 33/149/156/317, 15/33/186/195, 334, 15/154/156/224/317, 15/149/186/331, 15/86/149/186/195/317, 15/33/154/195, 15/156/186/331, 15/149/186/317, 15/33/156/186/214/224/331, 15/86/186/224/226/317, 15/154/331, 15/149/154/226, 15/33/195/226, 15/224/317/331, 15/86/186/195/317, 226/317/331, 330, 89, 15/149/186, 156/195/331, 156, 15/86/156/186/331, 275, 15/33/186/224, 15/186/317, 15/33/186/226/317, 15/149/154/156/331, 15/154/226/317, 15/86/156/186/195/317, 257, 15/154/156/186, 33/186/224, 335, 15/86/156/186/195/224/331, 154/156/317, 39, 2, 15/224/226/331, 15/33/149/224, 89/307, 15/154/156/317, 15/186/331, 15/33/154/317, 15/33/195/224/317, 15/156/224/226, 154/186/331, 185, 15/18/149/186/195, 86/149/154/156, 15/33/149/331, 326, 202, 119, 212, 15/33/156/317, 280, 142, 15/149, 15/33/86/156/195, 315, 256, 15/33/156/186, 138, 117, 116, 316, 69, 310, 317, 15/195/331, 15/33/331, 314, or 144, wherein the amino acid positions are relative to the reference sequence corresponding to residues 12 to 346 of SEQ ID NO: 42, or relative to the reference sequence corresponding to SEQ ID NO: 42.

31. The engineered RNA ligase of claim 28 or 29, wherein the amino acid sequence of the engineered RNA ligase comprises a substitution or substitution set 149R/156T/195G, 15M/149T/186R/224Y/317A, 15P/156T/195G/224Y/226I/317A/331L, 15M/195G/317A/331R, 149R/224Y/331R, 15E/195G/224Y/226I/317A/331W, 15P/33L/86G/149R/154C/195G/317A, 15M/86G/154C/156T/186R/195G/224Y/226I/331L, 15P/149R/224Y/317A/331R, 15M/154C/156T/186R/317A/331R, 15M/33L/149R/224Y/226I/331W, 15E/186R/224Y/226I/317A/331R, 15Y/33L/149R/186R/224Y/331R, 195G/224Y/331R, 15P/86G/156T/186R/195G/226I/317A/331L, 15M/195G/226/331W, 156T/186R/224Y/226I/331R, 15Y/149R/154C/156T/224Y/226I, 33L/156T/186R/195G/331L, 15P/86G/149R/154C/156T/317A/331R, 15M/186D/317A/331R, 15P/86G/149R/154C/195G/331L, 15Y/33L/149T/154C/156T/226I, 15P/149R/154C/186R/317A/331L, 195G/331R, 15M/86G/156T/186R/195G/331W, 149R/156T/224Y/226I/331W, 15P/149R/154C/156T/186R/317A/331L, 15Y/154C/186D/195G, 15E/86G/195G/224Y/226I, 230D, 15P/33L/156T/331R, 15L/33L/156T/195G/224Y/226I, 33L/149R/156T/317A, 15E/33L/186R/195G, 334R, 15E/154C/156T/224Y/317A, 15Y/149R/186R/331W, 15Y/86G/149T/186R/195G/317A, 15P/33L/154C/195G, 15P/154C/156T/186R/317A/331R, 15M/156T/186R/331R, 15Y/149T/186D/317A, 15E/33L/156T/186R/214I/224Y/331W, 15E/86G/186R/224Y/226I/317A, 15P/154C/331R, 15Y/149T/154C/226I, 15Y/33L/195G/226I, 15M/224Y/317A/331W, 15E/86G/186R/195G/317A, 226I/317A/331L, 330R, 89W, 15P/149R/186D/331L, 15P/149R/186R, 89M, 156T/195G/331L, 156A, 15E/86G/156T/186R/331R, 195G/331W, 275N, 15P/33L/186R/224Y, 15E/186R/317A, 15M/33L/186R/226I/317A, 89G, 15Y/149R/154C/156T/331W, 15Y/154C/226I/317A, 15Y/86G/156T/186R/195G/317A, 257L, 15Y/154C/156T/186D, 33L/186R/224Y, 335H, 15Y/86G/156T/186R/195G/224Y/331W, 154C/156T/317A, 39Q, 2G, 15M/224Y/226I/331R, 15M/33L/149R/224Y, 89I/307Q, 15M/154C/156T/317A, 15E/186R/331W, 15P/33L/154C/317A, 89H, 15Y/33L/195G/224Y/317A, 15E/156T/224Y/226I, 154C/186R/331L, 185G, 15M/18I/149R/186R/195G, 86G/149R/154C/156T, 15P/33L/149R/331L, 326R, 202Y, 119T, 212I, 2V, 15E/149R/154C/156T/331L, 15P/33L/156T/317A, 15Y/154C/156T/317A, 156L, 335D, 156T, 2E, 280G, 142R, 15E/149R, 156Q, 15E/33L/86G/156T/195G, 315T, 185K, 39S, 256A, 15Y/33L/156T/186D, 138R, 117D, 116N, 316L, 15M/149R, 69D, 156N, 310K, 317A, 15Y/195G/331L, 15M/33L/331L, 330M, 314W, 144W, 15Y/149R, or 315S, wherein the amino acid positions are relative to the reference sequence corresponding to residues 12 to 346 of SEQ ID NO: 42, or relative to the reference sequence corresponding to SEQ ID NO: 42.

32. The engineered RNA ligase of claim 28 or 29, wherein the amino acid sequence of the engineered RNA ligase comprises at least a substitution set at amino acid positions(s) 15/149/154/156/186/195/331, 149/154/186/195/224/317/331, 15/33/149/154/186/195, 149/156/186/195/224/226/317, 15/149/156/195/224/226, 15/33/86/149/154/156/186/195/226/331, 15/149/156/186/195/224/317/331, 15/33/149/154/195/317, 15/149/154/195/224/317, 15/149/156/186/224/226/317/331, 15/33/149/154/156/186/195/224/226/317/331, 149/195/224, 86/149/154/156/186/195/331, 15/33/149/156/195/224/317/331, 15/149/154/156/186/195/317/331, 15/33/149/154/156/186/224/331, 15/149/154/156/195/224, 15/149/154/156/195/224/226, 15/149/154/156/186/195/224/317, 33/149/156/186/224/331, 15/33/86/149/195/224/331, 15/86/149/154/156/186/195/331, 149/186/195/331, 15/154/156/186/226/331, 15/149/154/186/195/224/226, 15/149/154/156/195/224/331, 15/33/149/154/156/195/317/331, 15/33/154/156/186/195/224/317/331, 15/149/186/195/224/331, 15/33/149/154/156/195/224/331, 15/149/154/156/224/226/317/331, 15/33/149/156/195/331, 15/149/154/156/186/224/226/331, 154/156/195/224/226, 15/33/86/149/154/156/186/195/224/317/331, 15/149/154/156/186/195/224/226, 15/33/149/195/317/331, 15/149/154/224/331, 149/154/156/195/224/226/331, 15/149/154/195/331, 15/149/154/156/186/195, 15/33/149/154/156/186/195, 15/33/86/149/154/195/224/317/331, or 149/186/195/224/226/331, wherein the amino acid positions are relative to the reference sequence corresponding to residues 12 to 346 of SEQ ID NO: 42, or relative to the reference sequence corresponding to SEQ ID NO: 42.

33. The engineered RNA ligase of claim 28 or 29, wherein the amino acid sequence of the engineered RNA ligase comprises at least a substitution set 15M/149R/154C/156T/186R/195G/331R, 149R/154C/186D/195G/224Y/317A/331R, 15M/33L/149T/154C/186R/195G, 149R/156T/186R/195G/224Y/226I/317A, 15Y/149R/156T/195G/224Y/226I, 15Y/33L/86G/149T/154C/156T/186R/195G/226I/331W, 15Y/149R/156T/186R/195G/224Y/317A/331W, 15M/33L/149T/154C/195G/317A, 15M/149R/154C/195G/224Y/317A, 15Y/149R/156T/186D/224Y/226I/317A/331R, 15M/149T/154C/156T/186D/195G/331L, 15Y/33L/149R/154C/156T/186R/195G/224Y/226I/317A/331R, 149R/195G/224Y, 86G/149T/154C/156T/186R/195G/331L, 15P/33L/149R/156T/195G/224Y/317A/331L, 15P/149T/154C/156T/186D/195G/317A/331L, 15Y/33L/149T/154C/156T/186D/224Y/331L, 15P/149R/156T/186R/195G/224Y/317A/331W, 15Y/149R/154C/156T/195G/224Y, 15M/149T/154C/156T/195G/224Y/226I, 15E/149R/154C/156T/186R/195G/224Y/317A, 33L/149T/156T/186R/224Y/331L, 15Y/33L/86G/149R/195G/224Y/331W, 15E/86G/149R/154C/156T/186R/195G/331W, 149R/186R/195G/331W, 15E/154C/156T/186D/226I/331R, 15Y/149T/154C/186R/195G/224Y/226I, 15P/149R/154C/156T/195G/224Y/331W, 15E/33L/149R/154C/156T/195G/317A/331L, 15E/33L/154C/156T/186R/195G/224Y/317A/331L, 15P/149R/186D/195G/224Y/331L, 15P/33L/149R/154C/156T/195G/224Y/331W, 15P/149T/154C/156T/224Y/226I/317A/331W, 15P/33L/149T/156T/195G/331W, 15P/149T/154C/156T/186D/224Y/226I/331L, 154C/156T/195G/224Y/226I, 15Y/33L/86G/149R/154C/156T/186D/195G/224Y/317A/331W, 15Y/149R/154C/156T/186R/195G/224Y/226I, 15P/33L/149R/195G/317A/331L, 15E/149T/154C/224Y/331R, 149T/154C/156T/195G/224Y/226I/331R, 15M/149R/154C/195G/331L, 15Y/149R/154C/156T/186R/195G, 15E/149T/154C/156T/186R/195G/331R, 15M/33L/149T/154C/156T/186R/195G, 15P/33L/86G/149R/154C/195G/224Y/317A/331R, or 149R/186D/195G/224Y/226I/331R, wherein the amino acid positions are relative to the reference sequence corresponding to residues 12 to 346 of SEQ ID NO: 42, or relative to the reference sequence corresponding to SEQ ID NO: 42.

34. The engineered RNA ligase of claim 19, comprising an amino acid sequence having at least 80%, 81%, 82%, 83%, 84%, 85%, 86%, 87%, 88%, 89%, 90%, 91%, 92%, 93%, 94%, 95%, 96%, 97%, 98%, 99%, or more sequence identity to the reference sequence corresponding to residues 12 to 346 of SEQ ID NO: 204, or to the reference sequence corresponding to SEQ ID NO: 204, wherein the amino acid sequence comprises one or more substitutions relative to the reference sequence corresponding to residues 12 to 346 of SEQ ID NO: 204, or relative to the reference sequence corresponding to SEQ ID NO: 204.

35. The engineered RNA ligase of claim 20, comprising an amino acid sequence having at least 80%, 81%, 82%, 83%, 84%, 85%, 86%, 87%, 88%, 89%, 90%, 91%, 92%, 93%, 94%, 95%, 96%, 97%, 98%, 99%, or more sequence identity to the reference sequence corresponding to residues 12 to 346 of an even-numbered SEQ ID NO. of SEQ ID NOs: 480-582, to the reference sequence corresponding to an even-numbered SEQ ID NO. of SEQ ID NOs: 480-582, wherein the amino acid sequence comprises one or more substitutions relative to the reference sequence corresponding to residues 12 to 346 of SEQ ID NO: 204, or relative to the reference sequence corresponding to SEQ ID NO: 204.

36. The engineered RNA ligase of claim 34 or 35, wherein the amino acid sequence of the engineered RNA ligase comprises at least a substitution or substitution set at amino acid position(s) 2/39/69/144/156/316/330, 2/39/69/119/185/316, 69/212/256/330, 39/119/256/316/326/330, 69/116/119/185/330, 2/39/119/144/156/159/202/256/316/326/330, 81/183/185/230, 2/39/69/116/144/156/185, 2/14/39/69/116/119/159/185/256/326, 2/116/119/316, 116/119/144/185/314/316, 39/69/116/144/181/185/256/330, 2/39/69/119/144/156/185/314, 14/39/69/144/156/212/256/314/316/326/330, 39/69/144/156/185/316/330, 156/185/334/335, 39/63/156/230/257/275/330/335, 156/266/316/330/334/335, 39/63/156/183/185/230/330/334, 69/144/316, 116/119/156/202/212/326/330, 39/69/119/138/181/185/316/326, 39/81/156/230, 2/14/69/116/119/144/159/326/330, 39/156/334/345, 230/266/334, 2/116/144/156/159, 156/183/185/230, 2/14/116/316/326/330, 39/63/156/230/316/345, 69/138/144/159/185/202/316, 39/156/257/266/316/334, 156/257/275/334, 183, 89/156/185/230/316/345, 2/14/119, 144/156/316/330, 39/81/185/316/334, 89/230/266/345, 39/156/230/275/316, 39/156/230/266/334/335, 156/185/275/316/330, 119/156/202, 230/257/275/316/330/345, 230, 81/156/330/335/345, 156/183/230/266, 39/185, 39/81/183/275/316/334/345, 156/230/257/316, 39/116/156, or 183/185/257/275/316/330/334, wherein the amino acid positions are relative to the reference sequence corresponding to residues 12 to 346 of SEQ ID NO: 204, or relative to the reference sequence corresponding to SEQ ID NO: 204.

37. The engineered RNA ligase of claim 34 or 35, wherein the amino acid sequence of the engineered RNA ligase comprises at least a substitution or substitution set 2E/39S/69D/144W/156L/316L/330M, 2V/39S/69D/119T/185K/316L, 69D/212I/256A/330M, 39S/119T/256A/316L/326R/330M, 69D/116N/119T/185K/330M, 2E/39S/119T/144W/156N/159F/202Y/256A/316L/326R/330M, 81Y/183V/185G/230D, 2V/39S/69D/116N/144W/156L/185K, 2E/14K/39S/69D/116N/119T/159F/185K/256A/326R, 2E/116N/119T/316L, 116N/119T/144W/185K/314W/316L, 39S/69D/116N/144W/181D/185K/256A/330M, 2E/39S/69D/119T/144W/156L/185K/314W, 14K/39S/69D/144W/156N/212I/256A/314W/316L/326R/330M, 39S/69D/144W/156L/185K/316L/330M, 156Q/185G/334R/335H, 39Q/63V/156Q/230D/257L/275N/330R/335H, 156Q/266L/316L/330R/334R/335H, 39Q/63V/156Q/183V/185G/230D/330R/334R, 69D/144W/316L, 116N/119T/156L/202Y/212I/326R/330M, 39S/69D/119T/138R/181D/185K/316L/326R, 39Q/81Y/156Q/230D, 2V/14K/69D/116N/119T/144W/159F/326R/330M, 39Q/156A/334R/345V, 230D/266L/334R, 2V/116N/144W/156L/159F, 156A/183V/185G/230D, 2E/14K/116N/316L/326R/330M, 39Q/63V/156A/230D/316L/345V, 69D/138R/144W/159F/185K/202Y/316L, 39Q/156Q/257L/266L/316L/334R, 156Q/257L/275N/334R, 183V, 89W/156A/185G/230D/316L/345V, 2E/14K/119T, 144W/156L/316L/330M, 39Q/81Y/185G/316L/334R, 89H/230D/266L/345V, 39Q/156Q/230D/275N/316L, 39Q/156Q/230D/266L/334R/335H, 156Q/185G/275N/316L/330R, 119T/156N/202Y, 230D/257L/275N/316L/330R/345V, 230D, 81Y/156Q/330R/335H/345V, 156A/183V/230D/266L, 39S/185K, 39Q/81Y/183V/275N/316L/334R/345V, 156A/230D/257L/316L, 39S/116N/156N, or 183V/185G/257L/275N/316L/330R/334R, wherein the amino acid positions are relative to the reference sequence corresponding to residues 12 to 346 of SEQ ID NO: 204, or relative to the reference sequence corresponding to SEQ ID NO: 204.

38. The engineered RNA ligase of claim 1, wherein the amino acid sequence of the engineered RNA ligase comprises at least one substitution provided in Tables 6.1, 7.1, 8.1, 9.1, 10.1, 11.1, and 12.1, wherein the amino acid positions are relative to the reference sequence corresponding to residues 12 to 346 of SEQ ID NO: 42 or 204, or relative to the reference sequence corresponding to SEQ ID NO: 42 or 204.

39. The engineered RNA ligase of claim 1, wherein the amino acid sequence of the engineered RNA ligase comprises at least a substitution or substitution set of an RNA ligase variant provided in Tables 6.1, 7.1, 8.1, 9.1, 10.1, 11.1, and 12.1, wherein the amino acid positions are relative to the reference sequence corresponding to residues 12 to 346 of SEQ ID NO: 42 or 204, or relative to the reference sequence corresponding to SEQ ID NO: 42 or 204.

40. The engineered RNA ligase of claim 1, comprising an amino acid sequence having least 80%, 81%, 82%, 83%, 84%, 85%, 86%, 87%, 88%, 89%, 90%, 91%, 92%, 93%, 94%, 95%, 96%, 97%, 98%, 99% or more sequence identity to a reference sequence comprising a substitution or substitution set provided in Tables 5.1, 6.1, 7.1, 8.1, 9.1, 10.1, 11.1, and 12.1, wherein the amino acid positions are relative to the reference sequence corresponding to residues 12 to 346 of SEQ ID NO: 14, 42, or 204, or relative to the reference sequence corresponding to SEQ ID NO: 14, 42, or 204.

41. The engineered RNA ligase of claim 1, wherein the RNA ligase comprises an amino acid sequence comprising residues 12 to 346 of an even numbered SEQ ID NO. of SEQ ID NOs: 24-582, or an amino acid sequence comprising an even numbered SEQ ID NO. of SEQ ID NOs: 24-582, optionally wherein the amino acid sequence has 1, 2, 3, 4, 5, 6, 7, 8, 9, or up to 10 substitutions.

42. The engineered RNA ligase of any one of claims 1-6, wherein the engineered RNA ligase comprises a fusion polypeptide.

43. The engineered RNA ligase of any one of claims 1-6, wherein the engineered RNA ligase has RNA ligase 2 activity.

44. The engineered RNA ligase of any one of claims 1-6, having at least one improved property as compared to a reference RNA ligase.

45. The engineered RNA ligase of claim 44, wherein the improved property is selected from i) increased activity, ii) increased stability, iii) increased thermostability, iv) increased product yield, v) increased activity on polynucleotides ligase substrates with phosphorothioate internucleotide linkages, vi) increased activity on oligonucleotides with 2′-modifications, vii) increased substrate tolerance, or any combination of i), ii), iii), iv), v), vi), and vii), compared to a reference RNA ligase.

46. The engineered RNA ligase of claim 44, wherein the reference RNA ligase has the sequence corresponding to residues 12 to 346 of SEQ ID NO: 14, 42, or 204, or the sequence corresponding to SEQ ID NO: 14, 42, or 204.

47. The engineered RNA ligase of claim 44, wherein the reference RNA ligase has the sequence corresponding to residues 12 to 346 of SEQ ID NO: 14, or the sequence corresponding to SEQ ID NO: 14.

48. The engineered RNA ligase of any one of claims 1-6, 16-21, 28, 29, 34, 35, and 38-41, wherein the engineered RNA ligase is purified.

49. A recombinant polynucleotide comprising a polynucleotide sequence encoding an engineered RNA ligase of any one of claims 1-6, 16-21, 28, 29, 34, 35, and 38-41.

50. The recombinant polynucleotide of claim 49, wherein the polynucleotide sequence has least 70%, 75%, 75%, 80%, 81%, 82%, 83%, 84%, 85%, 90%, 91%, 92%, 93%, 94%, 95%, 96%, 97%, 98%, 99%, or more sequence identity to a reference polynucleotide sequence corresponding to nucleotide residues 34 to 1038 of SEQ ID NO: 13, 41, or 203, or to a reference polynucleotide sequence corresponding to SEQ ID NO: 13, 41, or 203, wherein the recombinant polynucleotide encodes an RNA ligase.

51. The recombinant polynucleotide of claim 49, wherein the polynucleotide sequence has at least 70%, 75%, 80%, 81%, 82%, 83%, 84%, 85%, 90%, 91%, 92%, 93%, 94%, 95%, 96%, 97%, 98%, 99%, or more sequence identity to a reference polynucleotide sequence corresponding to nucleotide residues 34 to 1038 of an odd numbered SEQ ID NO. of SEQ ID NOs: 23-581, or to a reference polynucleotide sequence corresponding an odd numbered SEQ ID NO. of SEQ ID NOs: 23-581, wherein the recombinant polynucleotide encodes an RNA ligase.

52. The recombinant polynucleotide of claim 49, wherein the polynucleotide sequence is codon-optimized for expression of the encoded engineered RNA ligase.

53. The recombinant polynucleotide of claim 49, comprising
(a) a polynucleotide sequence comprising nucleotide residues 34 to 1038 of SEQ ID NO. 13, 41, or 203, or a polynucleotide sequence comprising SEQ ID NOs: 13, 41, or 203, or
(b) a polynucleotide sequence comprising nucleotide residues 34 to 1038 of an odd numbered SEQ ID NO. of SEQ ID NOs: 23-581, or a polynucleotide sequence comprising an odd numbered SEQ ID NO. of SEQ ID NOs: 23-581.

54. An expression vector comprising a recombinant polynucleotide of claim 49.

55. The expression vector of claim 54, wherein the polynucleotide is operably linked to a control sequence.

56. The expression vector of claim 55, wherein the control sequence comprises at least a promoter.

57. A host cell comprising an expression vector of claim 54.

58. The host cell of claim 57, comprising a prokaryotic cell or eukaryotic cell.

59. The host cell of claim 58, comprising a bacterial cell, fungal cell, insect cell, or mammalian cell.

60. A method of producing an engineered RNA ligase polypeptide in a host cell comprising culturing a host cell of claim 57, under suitable culture conditions such that the engineered RNA ligase is produced.

61. The method of claim 60, further comprising recovering the engineered RNA ligase from the culture and/or host cells.

62. The method of claim 60, further comprising purifying the engineered RNA ligase.

63. A composition comprising an RNA ligase of any one of claims 1-6, 16-21, 28, 29, 34, 35, and 38-41.

64. The composition of claim 63, further comprising one or more of a buffer, ATP or dATP, and one or more polynucleotide substrates for the RNA ligase.

65. A method of ligating at least a first polynucleotide strand and a second polynucleotide strand, comprising contacting a first polynucleotide strand and a second polynucleotide strand with an engineered RNA ligase of any one of claims 1-6, 16-21, 28, 29, 34, 35, and 38-41 in presence of a nucleotide substrate under conditions suitable for ligation of the first polynucleotide strand to the second polynucleotide strand, wherein the first polynucleotide strand comprises a ligatable 5′-end and the second polynucleotide strand comprises a 3′-end ligatable to the 5′-end of the first polynucleotide.

66. The method of claim 65, further comprising a third polynucleotide strand, wherein the first polynucleotide strand and second polynucleotide strand hybridize adjacent to one another on the third polynucleotide strand to position the 5′-end of the first polynucleotide strand adjacent to the 3′-end of the second polynucleotide strand.

67. The method of claim 66, wherein the third polynucleotide strand is continuous with the first polynucleotide strand or second polynucleotide strand.

68. The method of claim 67, wherein the third polynucleotide strand is continuous with the first polynucleotide strand and second polynucleotide strand to form a single continuous polynucleotide substrate.

69. The method of claim 66, wherein the third polynucleotide strand comprises a splint or bridging polynucleotide, wherein the 5′-terminal sequence of the first polynucleotide strand and the 3′-terminal sequence of the second polynucleotide strand hybridize adjacent to one another on the splint or bridging polynucleotide to position the 5′-end of the first polynucleotide strand adjacent to the 3′-end of the second polynucleotide strand.

70. The method of claim 66, wherein the first and third polynucleotide strands hybridize to each other to form a first double stranded polynucleotide fragment, and the second polynucleotide strand hybridizes to a fourth polynucleotide strand to form a second double stranded fragment, wherein the first and second double stranded fragments have complementary ends that can base pair to form substrates for the engineered RNA ligase.

71. The method of claim 65, wherein the first polynucleotide strand and/or second polynucleotide strand comprises RNA or a mixture of RNA and DNA.

72. The method of claim 65, wherein the 3′-end of the second polynucleotide strand is a 3′-OH.

73. The method of claim 65, wherein the 5′-end of the first polynucleotide strand is a 5′-phosphate.

74. The method of claim 65, wherein the internucleotide linkage comprises a phosphate linkage.

75. The method of claim 65, wherein the first polynucleotide strand and/or second polynucleotide strand comprise one or more nucleotide analogs, wherein the nucleotide analog comprises a modified nucleobase, modified nucleoside sugar residue, modified nucleobase or nucleobase analog, modified internucleotide linkage, and/or modified 5′-end phosphate group.

76. The method of claim 75, wherein the modified 5′-end phosphate group is a phosphate analog.

77. The method of claim 76, wherein the phosphate analog is a phosphorothioate or monomethylphosphate.

78. The method of claim 75, wherein the modified nucleoside sugar residue is a 2′-O-alkyl, a 2′-fluoro, a 3-D-ribo LNA, or a α-L-ribo-LNA (locked nucleic acids).

79. The method of claim 75, wherein the modified nucleobase or nucleobase analog is xanthine, hypoxanthine, inosine, 7-methylguanine, 2,6-diaminopurine, 5-methylcytosine, 5-hydroxycytosine, 5-bromocytosine, 5-iodocytosine, 2-thiothymine, 5-fluorouracil, 5-bromouracil, 8-bromoguanine, 8-aminoguanine, or 8-aza-7-deazaguanine.

80. The method of claim 75, wherein the internucleotide linkage is a phosphorothioate, phosphoacetate, phosphoramidate, methylphosphonate, or phosphonocarboxylate.

81. The method of claim 65, wherein the nucleotide substrate is ATP or dATP.

82. A kit comprising at least an RNA ligase of any one of claims 1-6, 16-21, 28, 29, 34, 35, and 38-41.

83. The kit of claim 82, further comprising one or more of a buffer, nucleotide substrate, a polynucleotide substrate of the ligase, and/or a ligation enhancer.
